(19) United States
(12) Patent Application Publication
(10) Pub. No.: US 2013/0029864 A1
(43) Pub. Date: Jan. 31, 2013

(54) BIOMARKERS FOR ALZHEIMER'S DISEASE

(71) Applicants: Angelika Lueking, Bochum (DE); Stefan Müllner, Langenfeld (DE); Charlotte Teunissen, Amersfoort (NL); Jens Wiltfang, Essen (DE)

(72) Inventors: Angelika Lueking, Bochum (DE); Stefan Müllner, Langenfeld (DE); Charlotte Teunissen, Amersfoort (NL); Jens Wiltfang, Essen (DE)

(73) Assignee: PROTAGEN Aktiengesellschaft, Dortmund (DE)

(21) Appl. No.: 13/499,546

(22) PCT Filed: Oct. 1, 2010
(86) PCT No.: PCT/EP2010/064689

§ 371 Date: Oct. 17, 2012

(30) Foreign Application Priority Data
Oct. 1, 2009 (EP) 09171938.5

(51) Int. Cl. C40B 30/04; C40B 40/08

(52) U.S. Cl. 506/9; 506/17

(57) ABSTRACT

The invention relates to novel marker sequences for Alzheimer's disease, in particular Alzheimer's dementia, and their diagnostic use including a screening method in order to identify potential drugs for the treatment/prophylaxis of Alzheimer's disease by means of the said novel marker sequences. Moreover, the invention relates to a diagnostic device comprising said novel marker sequences for diagnosing Alzheimer's disease, particularly a protein array (chip) and its use hereto.

[0001] The invention relates to novel marker sequences for Alzheimer's disease, in particular Alzheimer's dementia, and their diagnostic use including a screening method in order to identify potential drugs for the treatment/prophylaxis of Alzheimer's disease by means of the said novel marker sequences. Moreover, the invention relates to a diagnostic device comprising said novel marker sequences for diagnosing Alzheimer's disease, particularly a protein array (chip) and its use hereto.

[0002] Protein biochips are of increasing industrial importance regarding analysis and diagnostics, as well as for pharmaceutical development.

[0003] Particularly, a high gain of information could be provided using protein biochips in the analysis of the genome and of gene expression. Hereby, the fast and highly parallel detection of a multiplicity of specifically binding analysis molecules in the course of a single experiment is enabled. To generate protein biochips it is necessary that the required proteins are available. For this purpose, protein expression libraries were established. One possibility is high-throughput cloning of defined open reading frames (Heyman, J. A., Cornthwaite, J., Foncerrada, L., Gilmore, J. R., Gontang, E., Hartman, K. J., Hernandez, C. L., Hood, R., Hull, H. M., Lee, W. Y., Marcil, R., Marsh, E. J., Mudd, K. M., Patino, M. J., Purcell, T. J., Rowland, J. J., Sindici, M. L. and Hoeffler, J. P. (1999) Genome-scale cloning and expression of individual open reading frames using topoisomerase I-mediated ligation. Genome Res, 9, 383-392; Kersten, B., Feilner, T., Kramer, A., Wehrmeyer, S., Possling, A., Witt, I., Zanor, M. I., Stracke, R., Lueking, A., Kreutzberger, J., Lehrach, H. and Cahill, D. J. (2003) Generation of Arabidopsis protein chip for antibody and serum screening. Plant Molecular Biology, 52, 999-1010; Reboul, J., Vaglio, P., Rual, J. F., Lamesch, P., Martinez, M., Armstrong, C. M., Li, S., Jacotot, L., Bertin, N., Janky, R., Moore, T., Hudson, J. R., Jr., Hartley, J. L., Brasch, M. A., Vandenhaute, J., Boulton, S., Endress, G. A., Jenna, S., Chevet, E., Papasotiropoulos, V., Tolias, P. P., Ptacek, J., Snyder, M., Huang, R., Chance, M. R., Lee, H., Doucette-Stamm, L., Hill, D. E. and Vidal, M. (2003) C. elegans ORFeome version 1.1: experimental verification of the genome annotation and resource for proteome-scale protein expression. Nat Genet, 34, 35-41; Walhout, A. J., Temple, G. F., Brasch, M. A., Hartley, J. L., Lorson, M. A., van den Heuvel, S, and Vidal, M. (2000) GATEWAY recombinational cloning: application to the cloning of large numbers of open reading frames or ORFeomes. Methods Enzymol, 328, 575-592). However, this approach highly depends on the progress of genome sequencing projects and the annotation of these gene sequences. Furthermore, the determination of the expressed sequence can be ambiguous due to differential splicing processes. This problem may be circumvented by application of cDNA expression libraries (Büssow, K., Cahill, D., Nietfeld, W., Bancroft, D., Scherzinger, E., Lehrach, H. and Walter, G. (1998) A method for global protein expression and antibody screening on high-density filters of an arrayed cDNA library. Nucleic Acids Research, 26, 5007-5008; Büssow, K., Nordhoff, E., Lübbert, C., Lehrach, H. and Walter, G. (2000) A human cDNA library for high-throughput protein expression screening. Genomics, 65, 1-8; Holz, C., Lueking, A., Bovekamp, L., Gutjahr, C., Bolotina, N., Lehrach, H. and Cahill, D. J. (2001) A human cDNA expression library in yeast enriched for open reading frames. Genome Res, 11, 1730-1735; Lueking, A., Holz, C., Gotthold, C., Lehrach, H. and Cahill, D. (2000) A system for dual protein expression in Pichia pastoris and Escherichia coli, Protein Expr. Purif., 20, 372-378). Hereby, the cDNA of a particular tissue is cloned into a bacterial or a yeast expression vector. The vectors used for the expression are characterized in general by carrying inducible promoters that may be used to control the time of protein expression. Furthermore, expression vectors comprise sequences for so-called affinity epitopes or proteins which permit the specific detection of recombinant fusion proteins using an antibody directed against the affinity epitope, as well as the specific purification through affinity chromatography (IMAC).

[0004] For example, the gene products of a cDNA expression library from human fetal brain tissue in the bacterial expression system Escherichia coli were arranged in a high-density format on a membrane, and could be screened successfully with various antibodies. It could be shown that there were at least 66% full length proteins. Additionally, the recombinant proteins of this library could be expressed and purified in high-throughput manner (Braun P., Hu, Y., Shen, B., Halleck, A., Koundinya, M., Harlow, E. and LaBaer, J. (2002) Proteome-scale purification of human proteins from bacteria. Proc Natl Acad Sci USA, 99, 2654-2659; Büssow (2000) supra; Lueking, A., Horn, M., Eickhoff, H., Büssow, K., Lehrach, H. and Walter, G. (1999) Protein microarrays for gene expression and antibody screening. Analytical Biochemistry, 270, 103-111). Particularly, such protein biochips based on cDNA expression libraries are a subject of WO 99/57311 and WO 99/57312.

[0005] Recently, protein arrays and protein biochips have been used as well. For example, the binding specificity of various monoclonal antibodies such as anti HSP90, anti GAPDH or anti a-tubulin, could be analyzed in individual experiments on a protein microarray consisting of 96 human recombinantly expressed proteins (Lueking (1999) supra). Also, cross-reactivity of two monoclonal antibodies against approximately 2,500 different proteins could be studied (Lueking, A., Possling, A., Huber, 0., Beveridge, A., Horn, M., Eickhoff, H., Schuchardt, J., Lehrach, H. and Cahill, D. J. (2003) A Nonredundant Human Protein Chip for Antibody Screening and Serum Profiling. Mol Cell Proteomics, 2, 1342-1349). Other protein biochips are described in e.g. Lal et al or Kusnezow et al. (Lal et al (2002) Antibody arrays: An embryonic but rapidly growing technology, DDT, 7, 143-149; Kusnezow et al. (2003), Antibody microarrays: An evaluation of production parameters, Proteomics, 3, 254-264).

[0006] Protein biochips have an advantageously high sensitivity.

[0007] Proceeding from the described prior art, the object therefore presents itself of providing a protein biochip, specifically directed to the diagnosis of Alzheimer's disease, in particular Alzheimer's dementia.

[0008] There exists however a great need to come up with a reliable diagnosis in order to provide novel improved marker sequences and their diagnostic use for the treatment of Alzheimer's disease, in particular Alzheimer's dementia.

[0009] Thus, the technical problem underlying the invention is to provide improved (bio)markers and their diagnostic use for the treatment and prophylaxis of Alzheimer's disease, in particular Alzheimer's dementia.

[0010] The object is achieved according to the invention by providing the SEQ 1-179 of novel marker sequences, firstly identified by means of a protein biochip along with bioinformatics.

[0011] A further disadvantage is that in the prior art, sufficient sensitivity and/or specificity of the markers is/are usually not achieved.

[0012] On the one hand, the object is solved by providing the diagnostic markers of at least one cDNA selected from the group of SEQ 1-179 or each encoding a peptide thereof, or a partial sequence or fragment thereof, for diagnosing Alzheimer's disease, in particular Alzheimer's dementia, on the other hand, by means of a method for in-vitro diagnosing and/or stratifying the risk of Alzheimer's disease, in particular Alzheimer's dementia. In said method, at least one cDNA is selected from the group of SEQ 1-179 or each encoding a peptide thereof, or a partial sequence or fragment thereof, is/are determined in or from a patient who is to be examined (below method according to the invention).

[0013] The marker sequences according to the invention can be identified by differential screening of samples of healthy patients in comparison with patients suffering from Alzheimer's disease, in particular Alzheimer's dementia.

[0014] According to the invention, the term “risk stratification” encompasses the identification of patients, in particular emergency care and at-risk patients, with an unfavorable prognosis, for intensive diagnostics and for therapy/treatment/prophylaxis of Alzheimer's disease, in particular Alzheimer's dementia with the objective of enabling an optimal clinical outcome. Risk stratification according to the invention thus allows effective treatment methods for Alzheimer's disease, in particular Alzheimer's dementia and the newest medicaments.

[0015] A reliable diagnosis can take place by means of the method according to the invention, in particularly advantageous manner, and especially in cases of intensive care medicine. The method according to the invention allows clinical decisions that lead to rapid therapy success. Such clinical decisions also comprise further therapy by means of medications for treatment or therapy of Alzheimer's disease, in particular Alzheimer's dementia.

[0016] The invention therefore further relates to the identification of patients with increased risk and/or unfavorable prognosis of Alzheimer's disease, in particular Alzheimer's dementia, and symptomatic and/or asymptomatic patients.

[0017] Hence, the present invention is directed to a method for risk stratification for Alzheimer's disease, in particular Alzheimer's dementia, wherein at least one cDNA is selected from the group of SEQ 1-179 (SEQ 1a-179a) or each encoding a peptide thereof, or a partial sequence or fragment thereof, is determined by an in vitro diagnosis, preferably with the use of a protein biochip.

[0018] In the context of this invention, the term “Alzheimer's disease, in particular Alzheimer's dementia” can be understood as defined on the terms of Pschyrembel, Klinisches Wörterbuch [Clinical Dictionary], 261th edition, 2007, Berlin, for example.

[0019] In a preferred embodiment of the invention at least 2 to 5 or 10, preferably 30 to 50 marker sequences or 50 to 100 or more marker sequences are determined in or from a patient who is to be examined.

[0020] The marker sequences in accordance with the invention encompass the partial sequences or fragments thereof. In particular, such partial sequences preferably comprise 60% of the sequence of a (bio)marker according to the invention, in particular 70% and more, 80% and more, in particular 90 to 95% and fragments may have a sequence length of e.g. 50-100 or 70-120 nucleotides or encoding peptide of the said marker sequences.

[0021] In a further preferred embodiment of the invention the marker sequences according to the invention can be combined with other known biomarkers of the Alzheimer's disease, in particular Alzheimer's dementia.

[0022] In an embodiment of the method according to the invention, bodily fluid or tissue, particularly blood or most preferably cerebrospinal fluid (CSF), is taken from the patient to be examined, optionally whole blood or serum or obtainable plasma, and the diagnosis takes place in vitro/ex vivo, i.e. outside of the human or animal body.

[0023] It is very preferred that the probe is taken from cerebrospinal fluid (CSF) of the patient to be examined.

[0024] In a further preferred embodiment of the invention the invention relates to the use of the marker sequences as diagnostics, wherein at least one cDNA is selected from the group of SEQ 1-179 (SEQ 1a-179a) or each encoding a peptide thereof, or a partial sequence or fragment thereof.

[0025] The marker sequences according to the invention are subject of Table A along with the identified data base entry (cf. http://www.ncbi.nlm.nih.gov/) in order to point the known function of the marker sequences.

[0026] However, the said identified marker sequences do not refer to the full length sequences as depicted in the data base, but do refer to a part/fragment of said sequences, hereinafter SEQ 1-179.

[0027] In a further preferred embodiment the invention relates also to the full length sequences SEQ 1a-179a as identified in Table 1.

[0028] In a further embodiment the present invention is directed to a method for diagnosing Alzheimer's disease, in particular Alzheimer's dementia, wherein

a.) at least one cDNA selected from the group of SEQ 1-179 (SEQ 1a-179a) or each encoding a peptide thereof, or a partial sequence or fragment thereof is/are fixed on a solid support,
b.) contacting with a bodily fluid of a patient,
c.) determining/detecting a binding event between the bodily fluid and the marker sequence(s).

[0029] The determination of a binding event can be carried out with an antibody, probe or the like. The detection of the proteins used as the marker sequences may also be performed with the aid of further protein diagnostic methods known to those skilled in the art, in particular employing radioactive or fluorescence-marked antibodies. In particular, bioanalytical methods suitable for this purpose are to be cited here, such as immunohistochemistry, antibody arrays, luminex, ELISA, immunofluorescence, and radio immunoassays.

[0030] The term “solid support” comprises designs such as a filter, a membrane, a magnetic bead, a silica wafer, glass, metal, ceramics, plastics, a chip, a target for mass spectrometry or a matrix.

[0031] Said solid support may be chemically coated. For this, silylation, polylysine, epoxydation or other common coatings known to the skilled person may be especially considered.

[0032] As a filter, PVDF or nylon are preferred (e.g. Hybond N+ Amersham), whereas nitrocellulose (e.g. Schleicher & Schuell) is especially preferred. Said filter is preferably mounted on a second solid support which is preferably selected from silica wafer, glass, metal, plastics or ceramics.

[0033] Furthermore it is preferred that the solid support is planar and flat.

[0034] In another preferred embodiment of the array according to the invention, the array corresponds to a grid with the dimensions of a microtiter plate (96 wells, 384 wells or more), a silica wafer, a chip, a target for mass spectrometry, or a matrix. According to the invention, such an array according to the invention may enable screening of at least one binder to the protein binders with subsequent interpretation. After the binder has contacted a marker sequence, interpretation is conducted, for example using commercially available image analyzing software (GenePix Pro (Axon Laboratories), Aida (Ray test), ScanArray (Packard Bioscience).

[0035] The term “marker sequences” according to the invention means that a cDNA or an encoded peptide or protein is significant for Alzheimer's disease, in particular Alzheimer's dementia. For example, cDNA or each encoded peptide or protein thereof may have an interaction with substances of bodily fluids or tissue of a patient suffering from Alzheimer's disease, in particular Alzheimer's dementia (e.g. (Auto)Antigens (Epitop)/(Auto)Antibodies (Paratop) interaction). Such an interaction may be a binding between the interaction partners, like a hybridization in case of a cDNA or a peptide-peptide interaction or a mixture thereof (cf. e.g. J. Sambrook, E. F. Fritsch, T. Maniatis (1989), Molecular cloning: A laboratory manual, 2nd Edition, Cold Spring Harbor Laboratory Press, Cold Spring Harbor, USA oder Ausubel, “Current Protocols in Molecular Biology”, Green Publishing Associates and Wiley Interscience, N.Y. (1989)).

[0036] These marker sequences according to the invention may also have post-translational modifications in case of peptides such as glycolization, lip(o)idization, or derivatization.

[0037] In a particular embodiment, the marker sequences are present as clones. For example, such clones may be obtained by using a cDNA expression library according to the invention (Büssow et al. 1998 (supra)). In a preferred embodiment, such expression libraries containing clones are obtained using expression vectors from a cDNA expression library. These expression vectors preferably contain inducible promoters. Induction of the expression may be obtained e.g. using an inductor such as IPTG. Suitable expressions vectors are described in Terpe et al. (Terpe T. Appl Microbiol Biotechnol. 2003 January; 60(5):523-33). Additionally, the expression product is present preferably in the form of a fusion protein which contains for example at least one affinity epitope or tag. The tag may be one, but not limited to, containing c-myc, his tag, arg tag, FLAG, alkaline phosphatase, VS tag, T7 tag or strep tag, HAT tag, NusA, S tag, SBP tag, thioredoxin, DsbA, a fusion protein, preferably a cellulose-binding domain, green fluorescent protein, maltose-binding protein, calmodulin-binding protein, glutathione S-transferase or lacZ.

[0038] Expression libraries are known to a skilled person in the art; they may be prepared according to standard text books such as Sambrook et al, “Molecular Cloning, A laboratory handbook, 2nd edition (1989), CSH press, Cold Spring Harbor, N.Y. Also preferred are tissue-specific expression libraries (e.g. human tissue, especially human organs). Furthermore included according to the invention are expression libraries that can be obtained by exon-trapping. A synonym for expression library is expression bank.

[0039] Also preferred are protein biochips or corresponding expression libraries that do not exhibit any redundancy (so called: Uniclone® library) and that may be prepared for example according to the teachings of WO 99/57311 and WO 99/57312. These preferred Uniclone libraries have a high portion of non-defective fully expressed proteins of a cDNA expression library.

[0040] Within the context of this invention, the clones could also be, but not limited to, transformed bacteria, recombinant phages or transformed cells from mammals, insects, fungi, yeast or plants.

[0041] Hence, the present invention relates to an array, a diagnostic device or an arrangement of marker sequences or a in particular protein biochip for diagnosing Alzheimer's disease, in particular Alzheimer's dementia comprising at least one cDNA selected from the group of SEQ 1-179 (SEQ 1a-179a) or each encoding a peptide thereof, or a partial sequence or fragment thereof is/are fixed on a solid support.

[0042] The purpose of the following examples and figures is to explain the invention in greater detail, without however limiting the invention to said examples and figures.

### EXAMPLES

[0043] A protein biochip printed with >2700 autoantigen candidates was used to determine the IgG autoantibody repertoire in CSF (cerebrospinal fluid) samples of patients. CSF from patients with Alzheimer's Disease (AD) and controls were analyzed. Despite the small sample set, putative autoantigen candidates recognized by IgG in CSF from patients with AD have been identified using a threshold algorithm. Some of the putative autoantigens such as carbohydrate sulfotransferase-7 (CHST7), alpha 2 glycoprotein 1 (AZGP1), histone deacetylases (5 and 3), zinc finger and SCAN domain containing 21 (ZSCAN21), hairy and enhancer of split 5 (Drosophila) (HES5) and hippocalcin already described in the literature with regards to neurodegenerative and developmental diseases. This suggests that CSF is a highly suitable and preferred body fluid enabling diagnostic and prognostic purposes.

### Samples

[0044] Before the samples were incubated on Protein-Biochips, all samples were filtered with Sartorius VIVASPIN 2 columns (Product-Nr. VS0201) with a 10,000 MWCO PES membrane to separate peptides from the protein solution. During this filtration samples supplied in more than one tube were pooled. The supernatant of each sample was collected and used for the incubation on Protein-Biochips.

### Protein Biochip and Layout

[0045] The protein biochip contains more than 2700 affinity purified autoantigen candidates and is suitable for identification of human proteins detected by antibodies in biological samples. The expressed proteins are derived from different proprietary UNIclone® expression libraries and represent multiple gene families including pharmaceutically relevant protein classes such as kinases, membrane-associated proteins, cell-signalling proteins and metabolic proteins. All clones have been verified by DNA sequencing. Each human open reading frame (ORF) is expressed as an N-terminal His-tag fusion protein in Escherichia coli followed by immobilized metal ion affinity chromatography (IMAC) purification. The protein biochip consists of two fields each consisting of 16 subarrays. The two fields contain more than 2700 recombinant human proteins, which are printed in duplicates.

[0046] In addition, each subarray contains printed serial dilutions of control proteins, e.g. human or mouse immunoglobulin. The quality of the spotting and hybridization process is monitored for each chip by calculating the coefficient of variation (CV) of the control proteins.

### Incubation of Protein Biochips

[0047] The protein biochips were blocked for 1 h and incubated with the samples for 16 h at room temperature. The CSF samples were diluted 1:5 in incubation buffer. The partner supplied control samples were used as a reference.

[0048] The over-night incubation maximizes both antibody binding and refolding of immobilized proteins to reconstitute structural epitopes. Then, the microarrays were washed three times in washing buffer, and subsequently incubated with the antibody cascade in incubation buffer for 1 h at room temperature, followed by three washes with washing buffer. All incubation steps were carried out in a volume of 200 μl in an automated, temperature-controlled hybridization station (Tecan HS 4800 Pro). Read out of the results was performed with a confocal microarray reader (ScanArray 4000, Perkin Elmer Life Science) using identical settings for all biochips.

### Image and Data Analysis

[0049] Image analysis was performed using the software package GenePix Pro 6.0 (Molecular Devices). The mean intensity (median background subtracted) was determined for each protein spot. For bioinformatic analysis the average intensity of the two protein spots of each protein is determined which is then normalized using a concentration from the IgG process controls which has a medium signal intensity (signal antigen/mean signal of IgG process control×100=X units).

### Bioinformatic Analysis

[0050] To assess the classification potential of the data the following classification strategy was used to calculate important statistical measures such as sensitivity and specificity:

1. For each protein the mean intensity and standard deviation in the group of controls is calculated.
2. For each protein a cut-off level is defined, which is equal to the mean intensity plus 2 standard deviations.
3. For each protein the number of samples is counted that are above this threshold in the patient as well as the control group. Samples above this threshold are called “positive” and coloured blue in the final graphical representation.

[0051] The bioinformatics including determination of individual protein threshold is carried out by means of several tests.

[0052] In a first approach a Bonferroni Correction is carried out and thereafter a False Discovery Rate (FDR) is calculated in accordance with Benjamini & Hochberg. Moreover the rating of the proteins is supported by Support Vector Machines (SVM) (statistical approach).

### Significance Ranking of Marker Candidates

[0053] The CSF samples were incubated on protein biochips containing 2700 human proteins resulting in Table A (representing SEQ 1a-179a) and the enclosed sequence listing (SEQ 1-179).

TABLE A

| | |
|---|---|
| gi\|13128861 | Homo sapiens histone deacetylase 3 (HDAC3). mRNA |
| gi\|63252907 | Homo sapiens IQ motif and WD repeats 1 (IQWD1) transcript |
| | variant 1 mRNA |
| gi\|90903236 | Homo sapiens glutathione peroxidase 4 (phospholipid |
| | hydroperoxidase) (GPX4) transcript variant 1 mRNA |
| gi\|50086623 | Homo sapiens integrator complex subunit 4 (INTS4). mRNA |
| gi\|38679885 | Homo sapiens splA/ryanodine receptor domain and SOCS box |
| | containing 3 (SPSB3) mRNA |
| gi\|12408641 | Homo sapiens bromodomain containing 2 (BRD2). mRNA |
| gi\|4826881 | Homo sapiens THO complex 1 (THOC1). mRNA |
| gi\|37550270 | Homo sapiens chromosome 5 genomic contig. reference assembly |
| gi\|6005923 | Homo sapiens family with sequence similarity 107. member A |
| | (FAM107A). mRNA |
| gi\|89029256 | Homo sapiens chromosome 9 genomic contig. reference assembly |
| gi\|58219047 | Homo sapiens hairy and enhancer of split 5 (Drosophila) (HES5). |
| | mRNA |
| gi\|55925607 | Homo sapiens kelch-like 21 (Drosophila) (KLHL21) mRNA |
| gi\|33469963 | Homo sapiens splicing factor 4 (SF4) mRNA |
| gi\|38372939 | Homo sapiens alpha-2-glycoprotein 1 zinc (AZGP1) mRNA |
| gi\|13325056 | Homo sapiens solute carrier family 27 (fatty acid transporter) |
| | member 5 (SLC27A5) mRNA |
| gi\|51474120 | Homo sapiens chromosome 17 genomic contig reference assembly |
| gi\|63497678 | Homo sapiens chromosome 1 open reading frame 131 (C1orf131) |
| | mRNA |
| gi\|89035772 | Homo sapiens chromosome 12 genomic contig. reference assembly |
| gi\|4557440 | Homo sapiens cyclin-dependent kinase inhibitor 1C (p57. Kip2) |
| | (CDKN1C). mRNA |
| gi\|30581146 | Homo sapiens proteasome (prosome. macropain) inhibitor subunit 1 |
| | (PI31) (PSMF1). transcript variant 1. mRNA |
| gi\|22035555 | Homo sapiens BRF1 homolog subunit of RNA polymerase III |
| | transcription initiation factor IIIB (S. cerevisiae) (BRF1) transcript |
| | variant 1 mRNA |
| gi\|71164877 | Homo sapiens ribosomal protein S12 (RPS12) mRNA |
| gi\|18390348 | Homo sapiens ribosomal protein L7a (RPL7A) mRNA |
| gi\|51317357 | Homo sapiens HGFL gene (MGC17330). mRNA |
| gi\|10518498 | Homo sapiens ring finger protein 24 (RNF24). mRNA |
| gi\|8051607 | Homo sapiens heme oxygenase (decycling) 2 (HMOX2) mRNA |
| gi\|4758272 | endosulfine alpha isoform 3 [Homo sapiens] |
| gi\|50878292 | Homo sapiens tripartite motif-containing 45 (TRIM45) mRNA |
| gi\|4758985 | Homo sapiens RAB11B member RAS oncogene family (RAB11B) |
| | mRNA |
| gi\|16905511 | Homo sapiens ribosomal protein large P1 (RPLP1) transcript variant |
| | 1 mRNA |
| gi\|23510452 | Homo sapiens coactosin-like 1 (Dictyostelium) (COTL1). mRNA |
| gi\|50345985 | Homo sapiens ATP synthase. H+ transporting. mitochondrial F1 |
| | complex. beta polypeptide (ATP5B). nuclear gene encoding |
| | mitochondrial protein. mRNA |
| gi\|42794610 | Homo sapiens 6-phosphogluconolactonase (PGLS). mRNA |
| gi\|7669552 | Homo sapiens valosin-containing protein (VCP) mRNA |
| gi\|33286445 | Homo sapiens opioid growth factor receptor (OGFR) mRNA |
| gi\|16550193 | unnamed protein product [Homo sapiens] |
| gi\|39725676 | Homo sapiens nucleobindin 1 (NUCB1). mRNA |
| gi\|40353201 | Homo sapiens OTU domain containing 5 (OTUD5). mRNA |
| gi\|28178831 | Homo sapiens isocitrate dehydrogenase 2 (NADP+). mitochondrial |
| | (IDH2). mRNA |
| gi\|37537685 | Homo sapiens zinc finger and SCAN domain containing 21 |
| | (ZSCAN21). mRNA |
| gi\|20149616 | Homo sapiens neural proliferation differentiation and control 1 |
| | (NPDC1) mRNA |
| gi\|57242773 | Homo sapiens KIAA0100 (KIAA0100). mRNA |
| gi\|32171243 | Homo sapiens hypothetical protein DKFZp434G156 (NAG6) mRNA |
| gi\|49640010 | Homo sapiens tetratricopeptide repeat domain 3 (TTC3). transcript |
| | variant 2. mRNA |
| gi\|23238227 | Homo sapiens carbohydrate (N-acetylglucosamine 6-O) |
| | sulfotransferase 7 (CHST7) mRNA |
| gi\|19743568 | Homo sapiens TRAF family member-associated NFKB activator |
| | (TANK). transcript variant 1. mRNA |
| gi\|15214427 | PRG2 protein [Homo sapiens] |
| gi\|46358416 | Homo sapiens glutamate receptor metabotropic 3 (GRM3) mRNA |
| gi\|5031931 | nascent-polypeptide-associated complex alpha polypeptide [Homo |
| | sapiens] |
| gi\|45439358 | Homo sapiens triple functional domain (PTPRF interacting) (TRIO). |
| | mRNA |
| gi\|4324699 | nuclear mitotic apparatus protein 1 [Homo sapiens] |
| gi\|72534683 | Homo sapiens phospholipase D family. member 3 (PLD3). |
| | transcript variant 1. mRNA |
| gi\|67906194 | Homo sapiens ankyrin repeat and sterile alpha motif domain |
| | containing 6 (ANKS6) mRNA |
| gi\|7705806 | Homo sapiens coenzyme Q4 homolog (S. cerevisiae) (COQ4). |
| | mRNA |
| gi\|40353728 | Homo sapiens Ras and Rab interactor 3 (RIN3). mRNA |
| gi\|88942921 | Homo sapiens chromosome 1 genomic contig. reference assembly |
| gi\|113430465 | PREDICTED: Homo sapiens similar to ataxin 7-like 3 (LOC392485) |
| | mRNA |
| gi\|7705480 | Homo sapiens ubiquitin-fold modifier conjugating enzyme 1 (UFC1). |
| | mRNA |
| gi\|62750346 | Homo sapiens histone deacetylase 5 (HDAC5). transcript variant 1. |
| | mRNA |
| gi\|68800242 | Homo sapiens interleukin-1 receptor-associated kinase 1 (IRAK1). |
| | transcript variant 1. mRNA |
| gi\|71361681 | Homo sapiens nuclear mitotic apparatus protein 1 (NUMA1) mRNA |
| gi\|89040669 | Homo sapiens chromosome 16 genomic contig. alternate assembly |
| | (based on Celera assembly) |
| gi\|61102726 | Homo sapiens La ribonucleoprotein domain family member 1 |
| | (LARP1) transcript variant 1 mRNA |
| gi\|14249519 | Homo sapiens hypothetical protein FLJ14668 (FLJ14668) mRNA |
| gi\|89057698 | Homo sapiens chromosome 19 genomic contig alternate assembly |
| | (based on Celera assembly) |
| gi\|14110406 | Homo sapiens heterogeneous nuclear ribonucleoprotein D-like |
| | (HNRPDL) transcript variant 2 mRNA |
| gi\|5032030 | Homo sapiens RNA binding motif protein 5 (RBM5) mRNA |
| gi\|92859637 | Homo sapiens synaptotagmin V (SYT5) mRNA |
| gi\|33469975 | Homo sapiens activating transcription factor 4 (tax-responsive |
| | enhancer element B67) (ATF4) transcript variant 1 mRNA |
| gi\|17149845 | Homo sapiens FK506 binding protein 3. 25 kDa (FKBP3). mRNA |
| gi\|39573729 | Homo sapiens family with sequence similarity 39. member B |
| | (FAM39B). mRNA |
| gi\|56682958 | Homo sapiens ferritin. heavy polypeptide 1 (FTH1). mRNA |
| gi\|31652250 | Homo sapiens chromosome 3 open reading frame 19 (C3orf19). |
| | mRNA |
| gi\|22748978 | Homo sapiens chromosome 17 open reading frame 32 (C17orf32) |
| | mRNA |
| gi\|14110410 | Homo sapiens heterogeneous nuclear ribonucleoprotein D-like |
| | (HNRPDL) transcript variant 1 mRNA |
| gi\|4503528 | Homo sapiens eukaryotic translation initiation factor 4A isoform 1 |
| | (EIF4A1) mRNA |
| gi\|34147700 | Homo sapiens dehydrogenase/reductase (SDR family) member 13 |
| | (DHRS13) mRNA |
| gi\|113402448 | PREDICTED: Homo sapiens similar to CXYorf1-related protein |
| | (LOC653635) mRNA |
| gi\|8922357 | Homo sapiens PRP38 pre-mRNA processing factor 38 (yeast) |
| | domain containing B (PRPF38B) mRNA |
| gi\|32880228 | Homo sapiens selenoprotein O (SELO) mRNA |
| gi\|89033689 | Homo sapiens chromosome 10 genomic contig alternate assembly |
| | (based on Celera assembly) |
| gi\|71772259 | Homo sapiens ribosomal protein L5 (RPL5) mRNA |
| gi\|5174742 | Homo sapiens ubiquinol-cytochrome c reductase. Rieske iron-sulfur |
| | polypeptide 1 (UQCRFS1). mRNA |
| gi\|68448524 | Homo sapiens CD74 molecule major histocompatibility complex |
| | class II invariant chain (CD74) transcript variant 2 mRNA |
| gi\|47078280 | Homo sapiens family with sequence similarity 53 member B |
| | (FAM53B) mRNA |
| gi\|46389548 | Homo sapiens endosulfine alpha (ENSA). transcript variant 3. |
| | mRNA |
| gi\|16507207 | Homo sapiens capicua homolog (Drosophila) (CIC) mRNA |
| gi\|74027246 | Homo sapiens polyglutamine binding protein 1 (PQBP1) transcript |
| | variant 2 mRNA |
| gi\|113421166 | PREDICTED: Homo sapiens ankyrin repeat and sterile alpha motif |
| | domain containing 6 (ANKS6). mRNA |
| gi\|32484989 | Homo sapiens WD repeat and SOCS box-containing 2 (WSB2) |
| | mRNA |
| gi\|70673344 | Hexaribonucleotide binding protein 3 [Homo sapiens] |
| gi\|39725675 | Homo sapiens CDK2-associated protein 2 (CDK2AP2). mRNA |
| gi\|46411160 | Homo sapiens aconitase 2. mitochondrial (ACO2). nuclear gene |
| | encoding mitochondrial protein. mRNA |
| gi\|45439300 | Homo sapiens zinc finger protein 238 (ZNF238). transcript variant 2. |
| | mRNA |
| gi\|51468814 | Homo sapiens chromosome 11 genomic contig. reference assembly |
| gi\|74048536 | Homo sapiens praja 1 (PJA1) transcript variant 2 mRNA |
| gi\|73622128 | Homo sapiens caspase 6. apoptosis-related cysteine peptidase |
| | (CASP6). transcript variant alpha. mRNA |
| gi\|56181386 | Homo sapiens STIP1 homology and U-box containing protein 1 |
| | (STUB1) mRNA |
| NM_003333 | Homo sapiens ubiquitin A-52 residue ribosomal protein fusion |
| | product 1 (UBA52). transcript variant 2. mRNA |
| gi\|34147350 | Homo sapiens RAS-like family 11 member B (RASL11B) mRNA |
| gi\|34098945 | Homo sapiens Y box binding protein 1 (YBX1). mRNA |
| gi\|29826322 | Homo sapiens adducin 1 (alpha) (ADD1) transcript variant 3 mRNA |
| NT_010194 | Homo sapiens chromosome 15 genomic contig. reference assembly |
| gi\|8923114 | OTU domain-ubiquitin aldehyde binding 1 [Homo sapiens] |
| gi\|7020770 | unnamed protein product [Homo sapiens] |
| gi\|50820 | unnamed protein product [Mus musculus] |
| gi\|30583065 | asparagine synthetase [Homo sapiens] |
| gi\|50513864 | A Chain A-Structure-Activity Relationships In Purine-Based |
| | Inhibitor Binding To Hsp90 Isoforms |
| gi\|30048193 | PMF1 protein [Homo sapiens] |
| gi\|4885065 | amyloid precursor-like protein 1 isoform 2 precursor [Homo sapiens] |
| gi\|1177230 | zinc finger-Method: conceptual translation supplied by author |
| | [Homo sapiens] |
| gi\|14603190 | Melanoma antigen-family F-1 |
| gi\|603953 | KIAA0082 [Homo sapiens] |
| gi\|33150668 | rab1B ** |
| gi\|11056030 | protocadherin gamma subfamily A-2 isoform 1 precursor |
| gi\|30583897 | Homo sapiens ret finger protein * |
| gi\|39644771 | HNRPDL protein [Homo sapiens] |
| gi\|34533842 | unnamed protein product [Homo sapiens] |
| gi\|7512821 | T00347 hypothetical protein DKFZp566G1246.1-version I-human |
| | (fragment) |
| gi\|38197056 | FAM65A protein [Homo sapiens] |
| gi\|6679189 | P24B [Homo sapiens] |
| gi\|5453617 | zinc finger-HIT domain containing 1-putative cyclin G1 interacting |
| | protein-H_DJ0747G18.14-zinc finger protein-subfamily 4A (HIT |
| | domain containing)-member 1 |
| gi\|13559175 | dJ423B22.4 (ribosomal protein S27 (metallopanstimulin 1)) |
| gi\|30583223 | signal sequence receptor-delta (translocon-associated protein |
| | delta) [Homo sapiens] |
| gi\|10835234 | RED protein [Homo sapiens] |
| gi\|10720282 | Sorting nexin 4 [Homo sapiens] |
| gi\|7765076 | S3 ribosomal protein [Homo sapiens] |
| gi\|40786791 | complement component 3 [Homo sapiens] |
| gi\|34875599 | similar to chromosome 17 open reading frame 27 [Rattus |
| | norvegicus] |
| gi\|37547297 | hairy and enhancer of split 5 (Drosophila) [Homo sapiens] |
| gi\|37182091 | YME1L1 [Homo sapiens] |
| gi\|1477787 | suppressor of hairless protein 2 [Xenopus laevis] |
| gi\|4929268 | LOMP protein [Homo sapiens] |
| gi\|31747344 | ribosomal protein [Bothrops jararacussu] |
| gi\|1346343 | Keratin-type II cytoskeletal 1 (Cytokeratin 1) (K1) (CK 1) (67 kDa |
| | cytokeratin) (Hair alpha protein) |
| gi\|551450 | splicing factor SF3a60 [Homo sapiens] |
| gi\|15010818 | JKTBP1delta6 [Homo sapiens] |
| gi\|14705264 | HMGB2 protein [Homo sapiens] |
| gi\|31873909 | hypothetical protein [Homo sapiens] |
| gi\|21328448 | tyrosine 3-monooxygenase/tryptophan 5-monooxygenase activation |
| | protein-beta polypeptide [Homo sapiens] |
| gi\|42490994 | Unknown (protein for MGC: 87455) [Homo sapiens] |
| gi\|7657514 | GTP-binding protein RHO6 [Homo sapiens] |
| gi\|7705475 | hypothetical protein HSPC148 [Homo sapiens] |
| gi\|13358928 | hypothetical protein [Macaca fascicularis] |
| gi\|6063691 | porin isoform 1 [Homo sapiens] |
| gi\|2911264 | Unknown gene product [Homo sapiens] |
| gi\|28279301 | SYT5 protein [Homo sapiens] |
| gi\|22137761 | Phospholipase C-like 2 |
| gi\|19913512 | Fusion (involved in t(12-16) in malignant liposarcoma) |
| | [Homo sapiens] |
| gi\|37577151 | aortic preferentially expressed gene 1 [Homo sapiens] |
| gi\|30584105 | Homo sapiens mevalonate (diphospho) decarboxylase [synthetic |
| | construct] |
| gi\|34533094 | unnamed protein product [Homo sapiens] |
| gi\|11041473 | hypothetical protein [Macaca fascicularis] |
| gi\|49868 | put. beta-actin (aa 27-375) [Mus musculus] |
| gi\|4501841 | alanyl-tRNA synthetase [Homo sapiens] |
| gi\|32425497 | RAN protein [Homo sapiens] |
| gi\|38492965 | Chain A-Ef-Tu.Kirromycin Coordinates Fitted Into The Cryo-Em |
| | Map Of Ef-Tu Ternary Complex (Gdp.Kirromycin) Bound 70s |
| | Ribosome |
| gi\|42734381 | hypothetical protein BC009514 [Homo sapiens] |
| gi\|5730023 | RuvB-like 2 [Homo sapiens] |
| gi\|18606060 | Unknown (protein for IMAGE: 3538792) [Homo sapiens] |
| gi\|22760734 | unnamed protein product [Homo sapiens] |
| gi\|18088244 | PAI-RBP1 protein [Homo sapiens] |
| gi\|34782919 | FMNL1 protein [Homo sapiens] |
| gi\|22035554 | amyloid beta A4 precursor protein-binding-family B-member 1 |
| | isoform delta E9 [Homo sapiens] |
| gi\|7020622 | unnamed protein product [Homo sapiens] |
| gi\|7262378 | FGF intracellular binding protein isoform b 28 kDa |
| gi\|30582607 | Rho GDP dissociation inhibitor (GDI) alpha |
| gi\|14548073 | IKBE_HUMAN NF-kappaB inhibitor epsilon (NF-kappa-BIE) (I- |
| | kappa-B-epsilon) (IkappaBepsilon) (IKB-epsilon) (IKBE) |
| gi\|6226705 | alpha SNAP [Homo sapiens] |
| NM_005572 | Homo sapiens lamin A/C (LMNA). transcript variant 2 |
| NM_004418 | Homo sapiens dual specificity phosphatase 2 (DUSP2) |
| NM_016257 | Homo sapiens hippocalcin like 4 (HPCAL4) |
| gi\|1297097 | HLA-C alpha chain |
| NM_006360 | Homo sapiens PCI domain containing 1 (herpesvirus entry |
| | mediator) (PCID1) |
| NM_014593 | Homo sapiens CXXC finger 1 (PHD domain) (CXXC1). mRNA |
| NM_001010850 | Homo sapiens fusion (involved in t(12.16) in malignant liposarcoma) |
| | (FUS). transcript variant 2. mRNA |
| NM_002954 | Homo sapiens ribosomal protein S27a (RPS27A). mRNA |
| gi\|17386088 | ras effector-like protein |
| NM_002383 | Homo sapiens MYC-associated zinc finger protein (purine-binding |
| | transcription factor) (MAZ). mRNA |

The application's sequence listing, which the Patent Office published only in electronic form, follows.

SEQUENCE LISTING (179 sequences)

SEQ ID NO: 1 - DNA, 1186 bp, Homo Sapiens
  misc_feature (879)..(879): n is a, c, g, or t
  misc_feature (892)..(892): n is a, c, g, or t
  misc_feature (894)..(894): n is a, c, g, or t
  misc_feature (901)..(901): n is a, c, g, or t
  misc_feature (918)..(918): n is a, c, g, or t
  misc_feature (955)..(955): n is a, c, g, or t
  misc_feature (966)..(966): n is a, c, g, or t
  misc_feature (974)..(974): n is a, c, g, or t
  misc_feature (987)..(987): n is a, c, g, or t
  misc_feature (1014)..(1014): n is a, c, g, or t
  misc_feature (1056)..(1056): n is a, c, g, or t
  misc_feature (1067)..(1067): n is a, c, g, or t
  misc_feature (1082)..(1082): n is a, c, g, or t
  misc_feature (1084)..(1085): n is a, c, g, or t
  misc_feature (1096)..(1096): n is a, c, g, or t
  misc_feature (1098)..(1098): n is a, c, g, or t
  misc_feature (1103)..(1104): n is a, c, g, or t
  misc_feature (1116)..(1116): n is a, c, g, or t
  misc_feature (1127)..(1127): n is a, c, g, or t
  misc_feature (1139)..(1139): n is a, c, g, or t
  misc_feature (1149)..(1149): n is a, c, g, or t
  misc_feature (1155)..(1155): n is a, c, g, or t
  misc_feature (1161)..(1162): n is a, c, g, or t
  misc_feature (1172)..(1186): n is a, c, g, or t
agagaaattactatgagaggatcgcatcaccatcaccatcacggatcctatttaggtgacactatagaatcgtcgacccacgcgtccggctttaacctcagcatccgagggcatggggaatgcgttgaatatgtcaagagcttcaatatccctctactcgtgctgggtggtggtggttatactgtccgaaatgttgcccgctgctggacatatgagacatcgctgctggtagaagaggccattagtgaggagcttccctatagtgaatacttcgagtactttgccccagacttcacacttcatccagatgtcagcacccgcatcgagaatcagaactcacgccagtatctggaccagatccgccagacaatctttgaaaacctgaagatgctgaaccatgcacctagtgtccagattcatgacgtgcctgcagacctcctgacctatgacaggactgatgaggctgatgcagaggagaggggtcctgaggagaactatagcaggccagaggcacccaatgagttctatgatggagaccatgacaatgacaaggaaagcgatgtggagatttaagagtggcttgggatgctgtgtcccaaggaatttcttttcacctcttggttgggctggagggaaaaggagtggctcctagagtcctgggggtcaccccagggcttttgctgactctgggaaagagtctggagaccacatttggttctcgaaccatctacctgcttttcctctctctcccaaggcctgacaatggtacctattagggatgagatacagacaaggatagctatctgggacattattggcagtgggccctggaggccagtcccctaacccccccttgcccccttatttcttccctgcttnccctcgaacccananatttttnaagggatgaacgggtanacaaggactgaaattgcctctgacttcctcccccccnggggttctganttcttccnccccttgcttccngggaaaatgaaaaaaaaaaaaattggnaaggggctctggctccctaacacctgaatcccaaatgatggnaagttgttttncaagtgggggggagnanngaaaaagttcngntcccnntttggctttagncccttttaccncggttttttccnaaaaaacaanccggantttttnnaaaaaaaaannnnnnnnnnnnnnn

SEQ ID NO: 2 - DNA, 1268 bp, Homo Sapiens
  misc_feature (128)..(128): n is a, c, g, or t
  misc_feature (911)..(911): n is a, c, g, or t
  misc_feature (954)..(954): n is a, c, g, or t
  misc_feature (978)..(978): n is a, c, g, or t
  misc_feature (983)..(983): n is a, c, g, or t
  misc_feature (989)..(989): n is a, c, g, or t
  misc_feature (1035)..(1035): n is a, c, g, or t
  misc_feature (1051)..(1051): n is a, c, g, or t
  misc_feature (1063)..(1063): n is a, c, g, or t
  misc_feature (1071)..(1071): n is a, c, g, or t
  misc_feature (1106)..(1106): n is a, c, g, or t
  misc_feature (1114)..(1114): n is a, c, g, or t
  misc_feature (1126)..(1126): n is a, c, g, or t
  misc_feature (1135)..(1135): n is a, c, g, or t
  misc_feature (1145)..(1145): n is a, c, g, or t
  misc_feature (1149)..(1149): n is a, c, g, or t
  misc_feature (1169)..(1169): n is a, c, g, or t
  misc_feature (1177)..(1177): n is a, c, g, or t
  misc_feature (1179)..(1179): n is a, c, g, or t
  misc_feature (1184)..(1184): n is a, c, g, or t
  misc_feature (1191)..(1191): n is a, c, g, or t
  misc_feature (1206)..(1206): n is a, c, g, or t
  misc_feature (1210)..(1210): n is a, c, g, or t
  misc_feature (1214)..(1214): n is a, c, g, or t
  misc_feature (1216)..(1216): n is a, c, g, or t
  misc_feature (1221)..(1221): n is a, c, g, or t
  misc_feature (1234)..(1234): n is a, c, g, or t
  misc_feature (1237)..(1237): n is a, c, g, or t
  misc_feature (1250)..(1250): n is a, c, g, or t
  misc_feature (1266)..(1266): n is a, c, g, or t
  misc_feature (1268)..(1268): n is a, c, g, or t
tagagaaattactatgagaggatcgcatcaccatcaccatcacggatcctatttaggtgacactatagaatcgtcgacccacgcgtccgcacagagctcagtgcaaccaccagaaggagacagtgaancaaaagctcctgaagaatcatcagaggatgtgacaaaatatcaggaaggagtatctgcagaaaacccagttgagaaccatatcaatataacacaatcagataagttcacagccaagccattggattccaactcaggagaaagaaatgacctcaatcttgatcgctcttgtggggttccagaagaatctgcttcatctgaaaaagccaaggaaccagaaacttcagatcagactagcactgagagtgctaccaatgaaaataacaccaatcctgagcctcagttccaaacagaagccactgggccttcagctcatgaagaaacatccaccagggactctgctcttcaggacacagatgacagtgatgatgacccagtcctgatcccaggtgcaaggtatcgagcaggacctggtgatagacgctctgctgttgcccgtattcaggagttcttcagacggagaaaagaaaggaaagaaatggaagaattggatactttgaacattagaaggccgctagtaaaaatggtttataaaggccatcgcaactccaggacaatgataaaagaagccaatttctggggtgctaactttgtaatgagtggttctgactgtggccacattttcatctgggatcggcacactgctgagcatttgatgcttctggaagctgataatcatgtggtaaactgcctgcagccacatccgtttgacccaattttagcctcatctggcatagattatgacataaagatctggtcaccattagaagagtcaaggatttttnaaccgaaaacttgctgatgaagttataactcgaaacgaactcntgctggaagaaactagaaacaccnttacngttccngcctctttcatgttgaggatgttggcttcccttaatcatatccganctgacggttggagggngacaaatcaaangctctggncacaaaatggaaatgaggatgaggataataactcntttggcancccttaatgtcngaatttgtnaaaaactttnttantttttttcttacaaactttnggcatttnanggtanggtttgnaattttccctttttngganaccnanattgnttggaaaatgggngcnaaatttgggaatnttaaaacaaactcccnan

SEQ ID NO: 3 - DNA, 939 bp, Homo Sapiens
  misc_feature (2)..(2): n is a, c, g, or t
  misc_feature (9)..(9): n is a, c, g, or t
antagaganattactatgagaggatcgcatcaccatcaccatcacggatcctatttaggtgacactatagaatcgtcgacccacgcgtccggacgaggggaggagccgctggctcccagccccgccgcgatgagcctcggccgcctttgccgcctactgaagccggcgctgctctgtggggctctggccgcgcctggcctggccgggaccatgtgcgcgtcccgggacgactggcgctgtgcgcgctccatgcacgagttttccgccaaggacatcgacgggcacatggttaacctggacaagtaccggggcttcgtgtgcatcgtcaccaacgtggcctcccagtgaggcaagaccgaagtaaactacactcagctcgtcgacctgcacgcccgatacgctgagtgtggtttgcggatcctggccttcccgtgtaaccagttcgggaagcaggagccagggagtaacgaagagatcaaagagttcgccgcgggctacaacgtcaaattcgatatgttcagcaagatctgcgtgaacggggacgacgcccacccgctgtggaagtggatgaagatccaacccaagggcaagggcatcctgggaaatgccatcaagtggaacttcaccaagttcctcatcgacaagaacggctgcgtggtgaagcgctacggacccatggaggagcccctggtgatagagaaggacctgccccactatttctagctccacaagtgtgtggccccgcccgagcccctgcccacgcccttggagccttccaccggcactcatgacggcctgcctgcaaacctgctggtggggcagaacccgaaaatccagcgtgcaccccgccggaggaaggtccccatggcctgctgggcttggctcggcgccccacccctggctaccttgtgggaataaacagacaaattagcctgctgg

SEQ ID NO: 4 - DNA, 1377 bp, Homo Sapiens
  misc_feature (1)..(1): n is a, c, g, or t
  misc_feature (897)..(897): n is a, c, g, or t
  misc_feature (942)..(942): n is a, c, g, or t
  misc_feature (944)..(944): n is a, c, g, or t
  misc_feature (950)..(950): n is a, c, g, or t
  misc_feature (964)..(964): n is a, c, g, or t
  misc_feature (971)..(971): n is a, c, g, or t
  misc_feature (973)..(973): n is a, c, g, or t
  misc_feature (1006)..(1006): n is a, c, g, or t
  misc_feature (1011)..(1011): n is a, c, g, or t
  misc_feature (1017)..(1017): n is a, c, g, or t
  misc_feature (1023)..(1023): n is a, c, g, or t
  misc_feature (1025)..(1025): n is a, c, g, or t
  misc_feature (1037)..(1037): n is a, c, g, or t
  misc_feature (1050)..(1050): n is a, c, g, or t
  misc_feature (1052)..(1052): n is a, c, g, or t
  misc_feature (1055)..(1055): n is a, c, g, or t
  misc_feature (1061)..(1062): n is a, c, g, or t
  misc_feature (1072)..(1072): n is a, c, g, or t
  misc_feature (1077)..(1077): n is a, c, g, or t
  misc_feature (1083)..(1083): n is a, c, g, or t
  misc_feature (1086)..(1086): n is a, c, g, or t
  misc_feature (1095)..(1095): n is a, c, g, or t
  misc_feature (1119)..(1119): n is a, c, g, or t
  misc_feature (1125)..(1125): n is a, c, g, or t
  misc_feature (1143)..(1143): n is a, c, g, or t
  misc_feature (1145)..(1145): n is a, c, g, or t
  misc_feature (1151)..(1151): n is a, c, g, or t
  misc_feature (1157)..(1157): n is a, c, g, or t
  misc_feature (1160)..(1160): n is a, c, g, or t
  misc_feature (1167)..(1167): n is a, c, g, or t
  misc_feature (1175)..(1175): n is a, c, g, or t
  misc_feature (1215)..(1215): n is a, c, g, or t
  misc_feature (1217)..(1218): n is a, c, g, or t
  misc_feature (1224)..(1224): n is a, c, g, or t
  misc_feature (1231)..(1231): n is a, c, g, or t
  misc_feature (1245)..(1245): n is a, c, g, or t
  misc_feature (1255)..(1255): n is a, c, g, or t
  misc_feature (1258)..(1258): n is a, c, g, or t
  misc_feature (1260)..(1261): n is a, c, g, or t
  misc_feature (1264)..(1264): n is a, c, g, or t
  misc_feature (1281)..(1282): n is a, c, g, or t
  misc_feature (1286)..(1286): n is a, c, g, or t
  misc_feature (1300)..(1300): n is a, c, g, or t
  misc_feature (1303)..(1303): n is a, c, g, or t
  misc_feature (1310)..(1310): n is a, c, g, or t
  misc_feature (1315)..(1315): n is a, c, g, or t
  misc_feature (1320)..(1320): n is a, c, g, or t
  misc_feature (1345)..(1345): n is a, c, g, or t
  misc_feature (1350)..(1350): n is a, c, g, or t
  misc_feature (1353)..(1353): n is a, c, g, or t
  misc_feature (1357)..(1357): n is a, c, g, or t
  misc_feature (1372)..(1372): n is a, c, g, or t
naatagagaaattactatgagaggatcgcatcaccatcaccatcacggatcctatttaggtgacactatagaatcgtcgacccacgcgtccgcaggtagaaaactggtgtcatcagctgtttctcccagcatcatacctcaagaggatccttcccagcagttcctgcagcagagccttgaaagagtgtatagtcttcagcacttggaccctcagggagcccaggagctgctggaattcaccatcagggatctgcaaagacttggagaacttcaatctgaattggcaggagtagctgatttctctgccacctatcttcgctgtcaactacttctcatcaaggccttgcagaaaagttgtggaatgtagctgcccctttgtatttgaagcagagtgatttggcctcagcagcagcgaaacagattatggaagagacctacaaaatggaattcatgtacagtggtgtggagaataagcaggtggtgattatacatcacatgaggctgcaggccaaagctttgcaacttatagtaacagcacgaactacacgaggacttgaccccttatttgggatgtgtgaaaaatttttacaggaagtagacttttttcagaggtatttcatcgctgatttgccccacttgcaggacagctttgtggacaaactccttgaccttatgccccgactcatgacatccaaacctgcagaagtggtcaaaattctacagaccatgctgcgacagagtgcctttctgcatctcccgcttccagagcagatccacaaagcctcagccaccatcatcgagccagcgggcgagtcagacaaccctttgcggtttacctctgggttggtggttgccctggatgttgatgcaaccctggagcatgtgcaggatcctcanaacactgttaaggtccaggtctaatatccagatggccaggctcanangattcnccccaagcctgcanacttccngnaatcctggcccagggcggcaccggctcatcacncaggnttatcnctcccncnccgcttggacanaggcctgccaggngnaantgaagnntgctgctggncctanactccnggnccccattcnaaaaggcccctgaagggagggggngaaagntccccccgggggaaaccncnatcggnggcccnttnccttcanaagccggnaaaatttaataatgcccaacctgcccgggctaggaaaaananncttccnaccgggncaaaaggccccttnagggccaaangancnnccngaacccctccccgaatnngggnagcttaagaatggnccntcccccntcggnaaaancgaaaatttttctttaaaaaaaaancttanttntccntccccgccaaagggnaaacc

SEQ ID NO: 5 - DNA, 1147 bp, Homo Sapiens
  misc_feature (894)..(894): n is a, c, g, or t
  misc_feature (906)..(906): n is a, c, g, or t
  misc_feature (926)..(926): n is a, c, g, or t
  misc_feature (930)..(930): n is a, c, g, or t
  misc_feature (932)..(932): n is a, c, g, or t
  misc_feature (941)..(941): n is a, c, g, or t
  misc_feature (958)..(958): n is a, c, g, or t
  misc_feature (984)..(984): n is a, c, g, or t
  misc_feature (989)..(989): n is a, c, g, or t
  misc_feature (991)..(991): n is a, c, g, or t
  misc_feature (1007)..(1007): n is a, c, g, or t
  misc_feature (1017)..(1017): n is a, c, g, or t
  misc_feature (1020)..(1021): n is a, c, g, or t
  misc_feature (1029)..(1029): n is a, c, g, or t
  misc_feature (1040)..(1040): n is a, c, g, or t
  misc_feature (1050)..(1050): n is a, c, g, or t
  misc_feature (1053)..(1054): n is a, c, g, or t
  misc_feature (1058)..(1058): n is a, c, g, or t
  misc_feature (1063)..(1063): n is a, c, g, or t
  misc_feature (1078)..(1078): n is a, c, g, or t
  misc_feature (1085)..(1085): n is a, c, g, or t
  misc_feature (1103)..(1103): n is a, c, g, or t
  misc_feature (1106)..(1106): n is a, c, g, or t
  misc_feature (1114)..(1114): n is a, c, g, or t
  misc_feature (1119)..(1119): n is a, c, g, or t
  misc_feature (1124)..(1124): n is a, c, g, or t
  misc_feature (1128)..(1128): n is a, c, g, or t
  misc_feature (1130)..(1130): n is a, c, g, or t
  misc_feature (1132)..(1132): n is a, c, g, or t
  misc_feature (1137)..(1137): n is a, c, g, or t
  misc_feature (1140)..(1140): n is a, c, g, or t
  misc_feature (1145)..(1145): n is a, c, g, or t
  misc_feature (1147)..(1147): n is a, c, g, or t
tagagaaaattactatgagaggatcgcatcaccatcaccatcacggatcctatttaggtgacactatagaatcgtcgacccacgcgtccgtccacatggagtacagctgcggcacagcggccatccggggcaccaaggagctgggggagggccagcacttctgggagatcaagatgacctctcccgtctacggcaccgacatgatggtgggcatcgggacgtcggatgtggacctggacaaataccgccacacgttctgcagcctgctgggcagggatgaggacagctggggcctctcctacacgggcctcctccaccacaagggcgacaagaccagcttctcgtcgcggttcggccagggctccatcattggcgtgcacctggacacctggcacggcacactcacctttttcaagaacaggaagtgtataggtgtggcagccaccaagctgcagaacaagagattctacccgatggtgtgctccacggcggcccggagcagcatgaaggtcacccgctcctgtgccagcgccacttccctccagtacctgtgctgccaccgcctgcgccagctgcggccagactcgggagacacgctggagggtctgccgctgccgccgggcctcaagcaggtgctacacaacaagctgggctgggtcctgagcatgagttgcagccgccgcaaggctccagtgtccgatccccaggcagcgacctccgcccaccccagcagtcgcgagcctcggccctgccagaggaagcgctgccgccggacctgactgacttcccagtggaactgccttcttgggctgggacagcccctttcctctgtcccttctttctctgtccccttcctttccagccacactccagggcggaattggatgaagcccnttccggaagganccatctcttgctcccaaggntggnanagtcctttntgtgggggctctaaggnccctctgctgctgtgctggggtgggnaaacngnctgccctgaaccccangtcttggggnagnntccaaganaaaaacctggntgaacccccnttnntttnccaanggccccggtttttcnaaattgntctgcatgctgtcacggntgncccccctnaaaantttanggangnanaatgnaanttatntn

SEQ ID NO: 6 - DNA, 1190 bp, Homo Sapiens
  misc_feature (979)..(979): n is a, c, g, or t
  misc_feature (987)..(987): n is a, c, g, or t
  misc_feature (990)..(990): n is a, c, g, or t
  misc_feature (995)..(995): n is a, c, g, or t
  misc_feature (1001)..(1001): n is a, c, g, or t
  misc_feature (1014)..(1014): n is a, c, g, or t
  misc_feature (1023)..(1023): n is a, c, g, or t
  misc_feature (1077)..(1077): n is a, c, g, or t
  misc_feature (1089)..(1089): n is a, c, g, or t
  misc_feature (1098)..(1098): n is a, c, g, or t
  misc_feature (1120)..(1120): n is a, c, g, or t
  misc_feature (1123)..(1123): n is a, c, g, or t
  misc_feature (1127)..(1127): n is a, c, g, or t
  misc_feature (1129)..(1129): n is a, c, g, or t
  misc_feature (1139)..(1139): n is a, c, g, or t
  misc_feature (1152)..(1152): n is a, c, g, or t
  misc_feature (1155)..(1155): n is a, c, g, or t
  misc_feature (1160)..(1160): n is a, c, g, or t
  misc_feature (1164)..(1164): n is a, c, g, or t
  misc_feature (1169)..(1169): n is a, c, g, or t
  misc_feature (1173)..(1173): n is a, c, g, or t
  misc_feature (1177)..(1177): n is a, c, g, or t
  misc_feature (1179)..(1179): n is a, c, g, or t
  misc_feature (1182)..(1182): n is a, c, g, or t
  misc_feature (1186)..(1186): n is a, c, g, or t
tagagaaattactatgagaggatcgcatcaccatcaccatcacggatcctatttaggtgacactatagaatcgtcgacccacgcgtccgccaagctccccaaaaaggccacaaagacagccccacctgccctgcctacaggttatgattcagaggaggaggaagagagcaggcccatgagttacgatgagaagcggcagctgagcctggacatcaacaaattacctggggagaagctgggccgagttgtgcatataatccaagccagggagccctctttacgtgattcaaacccagaagagattgagattgattttgaaacactcaagccatccacacttagagagcttgagcgctatgtcctttcctgcctacgtaagaaaccccggaagccctacaccattaagaagcctgtgggaaagacaaaggaggaactggctttggagaaaaagcgggaattagaaaagcggttacaagatgtcagcggacagctcaattctactaaaaagccccccaagaaagcgaatgagaaaacagagtcatcctctgcacagcaagtagcagtgtcacgccttagcgcttccagctccagctcagattccagctcctcctcttcctcgtcgtcgtcttcagacaccagtgattcagactcaggctaaggggtcaggccagatggggcaggaaggctccgcaggaccggacccctagaccaccctgccccacctgccccttccccctttgctgtgacacttcttcatctcacccccccctgcccccctctaggagagctggctctgcagtgggggagggatgcagggacatttactgaaggagggacatggacaaaacaacattgaattcccagccccattggggagtgatctcttggacacagagcccccattcaaatggggcagggcaagggtgggagtgtgcaaagccctgatctggagttacctgaggccatagctgcccctatnccttctanggncctgntttganatggttgttctanttattttanctaggtaagctgggggaaggtggggccctggtccctcacctcctggggaggganaaggggagctcnttttttacntgatttttttttcacccggttnccntttncntccccccttngggcccgggggtncanccttncccnttggncccnggangnttnttgntcca

SEQ ID NO: 7 - DNA, 146 bp, Homo Sapiens
  misc_feature (92)..(92): n is a, c, g, or t
  misc_feature (94)..(94): n is a, c, g, or t
  misc_feature (96)..(98): n is a, c, g, or t
  misc_feature (100)..(100): n is a, c, g, or t
  misc_feature (106)..(106): n is a, c, g, or t
  misc_feature (111)..(113): n is a, c, g, or t
  misc_feature (116)..(116): n is a, c, g, or t
  misc_feature (123)..(123): n is a, c, g, or t
  misc_feature (126)..(127): n is a, c, g, or t
  misc_feature (138)..(138): n is a, c, g, or t
tagagaaattactatgagaggatcgcatcaccatcaccatcacggatcctatttaggtgacactatagaatcgtcgacccacgcgtccgctncnannntngttcgnacgannnccncccccgnggnnttcctagggantggaccca

SEQ ID NO: 8 - DNA, 187 bp, Homo Sapiens
  misc_feature (1)..(1): n is a, c, g, or t
  misc_feature (3)..(4): n is a, c, g, or t
  misc_feature (7)..(8): n is a, c, g, or t
  misc_feature (10)..(10): n is a, c, g, or t
  misc_feature (12)..(12): n is a, c, g, or t
  misc_feature (14)..(14): n is a, c, g, or t
  misc_feature (19)..(19): n is a, c, g, or t
  misc_feature (27)..(28): n is a, c, g, or t
  misc_feature (30)..(30): n is a, c, g, or t
  misc_feature (32)..(32): n is a, c, g, or t
  misc_feature (50)..(50): n is a, c, g, or t
  misc_feature (59)..(59): n is a, c, g, or t
  misc_feature (61)..(61): n is a, c, g, or t
  misc_feature (72)..(72): n is a, c, g, or t
  misc_feature (75)..(75): n is a, c, g, or t
  misc_feature (85)..(85): n is a, c, g, or t
  misc_feature (93)..(93): n is a, c, g, or t
  misc_feature (119)..(119): n is a, c, g, or t
  misc_feature (130)..(130): n is a, c, g, or t
  misc_feature (132)..(133): n is a, c, g, or t
  misc_feature (137)..(137): n is a, c, g, or t
  misc_feature (140)..(140): n is a, c, g, or t
  misc_feature (142)..(142): n is a, c, g, or t
  misc_feature (154)..(154): n is a, c, g, or t
  misc_feature (161)..(161): n is a, c, g, or t
  misc_feature (169)..(169): n is a, c, g, or t
  misc_feature (171)..(171): n is a, c, g, or t
  misc_feature (173)..(173): n is a, c, g, or t
  misc_feature (178)..(178): n is a, c, g, or t
nannggnnantnanttttnaggggggnngntnccccccccccccctccgnggggatctntnttctttgtgtnggngggctaatanataatcgntcaaaaccccaccgccagcttctcgntgcagaaaaangnntccncananaatgtcacttcntcccacnccacgcgngngngtctncaggcgagc

SEQ ID NO: 9 - DNA, 1023 bp, Homo Sapiens
  misc_feature (1)..(1): n is a, c, g, or t
  misc_feature (836)..(836): n is a, c, g, or t
  misc_feature (838)..(838): n is a, c, g, or t
  misc_feature (843)..(843): n is a, c, g, or t
  misc_feature (864)..(864): n is a, c, g, or t
  misc_feature (871)..(871): n is a, c, g, or t
  misc_feature (874)..(874): n is a, c, g, or t
  misc_feature (878)..(878): n is a, c, g, or t
  misc_feature (880)..(880): n is a, c, g, or t
  misc_feature (921)..(921): n is a, c, g, or t
  misc_feature (930)..(930): n is a, c, g, or t
  misc_feature (943)..(943): n is a, c, g, or t
  misc_feature (966)..(966): n is a, c, g, or t
  misc_feature (973)..(974): n is a, c, g, or t
  misc_feature (977)..(977): n is a, c, g, or t
  misc_feature (981)..(981): n is a, c, g, or t
  misc_feature (997)..(997): n is a, c, g, or t
  misc_feature (1002)..(1002): n is a, c, g, or t
  misc_feature (1008)..(1008): n is a, c, g, or t
  misc_feature (1012)..(1013): n is a, c, g, or t
  misc_feature (1016)..(1018): n is a, c, g, or t
  misc_feature (1021)..(1021): n is a, c, g, or t
nttagagaaattactatgagaggatcgcatcaccatcaccatcacggatcctatttaggtgacactatagaatcgtcgacccacgcgtccgcccagcaacacgctcctgacttcccttcccaaggactcgacctgagaaccgccatgtactcggagatccagagggagcgggcagacattgggggcctgatggcccggccagaatacagagagtggaatccggagctcatcaagcccaagaagctgctgaaccccgtgaaggcctctcggagtcaccaggagctccaccgggagctgctcatgaaccacagaaggggccttggtgtggacagcaagccagagctgcagcgtgtcctagagcaccgccggcggaaccagctcatcaagaagaagaaggaggagctggaagccaagcggctgcagtgcccctttgagcaggagctgctgagacggcagcagaggctgaaccagctggaaaaaccaccagagaaggaagaggatcacgcccccgagtttattaaagtcagggaaaacctgcggagaattgccacactgaccagcgaagagagagagctgtagggccagctgccgggctcaggccactgcccaccctggcctggacagcctccttcagcccttctgtacctggcagccctgggccccaggccctgggacgtctgtgatgttcccacctgcttctgtagaaatgtgtcaccccagagggcctggctctccctgggaggctggggcccctaagctcctaggttttccttccaagcacccagccctcctgctccaagagggataacctgcacccctccctgcaaggggttcanancccancacaggagctttctctggcanaattgangangaanangtggccctctgacttgacaagccttctgttctgcccaggcnttccaccangaatctccgaggntcccagggcccgcttctccgtanaccccanntcntagntctcaaaaactccccncctgnggtttnctgnnccnnnaantt

SEQ ID NO: 10 - DNA, 638 bp, Homo Sapiens
  misc_feature (1)..(1): n is a, c, g, or t
  misc_feature (51)..(51): n is a, c, g, or t
  misc_feature (221)..(221): n is a, c, g, or t
  misc_feature (263)..(263): n is a, c, g, or t
  misc_feature (279)..(279): n is a, c, g, or t
  misc_feature (301)..(301): n is a, c, g, or t
  misc_feature (306)..(306): n is a, c, g, or t
  misc_feature (310)..(310): n is a, c, g, or t
  misc_feature (326)..(326): n is a, c, g, or t
  misc_feature (383)..(383): n is a, c, g, or t
  misc_feature (395)..(395): n is a, c, g, or t
  misc_feature (405)..(405): n is a, c, g, or t
  misc_feature (409)..(409): n is a, c, g, or t
  misc_feature (427)..(427): n is a, c, g, or t
  misc_feature (429)..(429): n is a, c, g, or t
  misc_feature (444)..(444): n is a, c, g, or t
  misc_feature (448)..(449): n is a, c, g, or t
  misc_feature (458)..(458): n is a, c, g, or t
  misc_feature (460)..(460): n is a, c, g, or t
  misc_feature (462)..(462): n is a, c, g, or t
  misc_feature (484)..(484): n is a, c, g, or t
  misc_feature (487)..(487): n is a, c, g, or t
  misc_feature (495)..(495): n is a, c, g, or t
  misc_feature (507)..(507): n is a, c, g, or t
  misc_feature (509)..(509): n is a, c, g, or t
  misc_feature (512)..(512): n is a, c, g, or t
  misc_feature (516)..(516): n is a, c, g, or t
  misc_feature (521)..(521): n is a, c, g, or t
  misc_feature (536)..(536): n is a, c, g, or t
  misc_feature (543)..(544): n is a, c, g, or t
  misc_feature (549)..(549): n is a, c, g, or t
  misc_feature (575)..(575): n is a, c, g, or t
  misc_feature (577)..(577): n is a, c, g, or t
  misc_feature (594)..(594): n is a, c, g, or t
  misc_feature (597)..(597): n is a, c, g, or t
  misc_feature (601)..(601): n is a, c, g, or t
  misc_feature (605)..(605): n is a, c, g, or t
  misc_feature (607)..(607): n is a, c, g, or t
  misc_feature (617)..(617): n is a, c, g, or t
  misc_feature (626)..(626): n is a, c, g, or t
  misc_feature (631)..(631): n is a, c, g, or t
  misc_feature (633)..(633): n is a, c, g, or t
  misc_feature (636)..(636): n is a, c, g, or t
ntagagagattactatgagaggatcgcatcaccactcaccatcacggatcntatttaggtgacactatagaatcgtcgacccacgcgctccgcaggcgccgccgggacgggcacgggcgcgcgggctccggcgggcgccggctgccttcctccgtcgctcgctgtctctcccggccgcattctcctccgctgcggggccgagctctccccagcgctcgcangaaggaagaagggagccgaggacgccgagaagttcccgcggnagccgcggatcccggncaaggcggaggctgcggctccnacggngcangagcgcgatccacggngaggggcgtacggccaaagggtccgcggcgtggagcgctcggaccttccgctctccnccgggcgtgggncgggaccccntganacgcgcccacgaggggcncnagattcctaacttgngcgnngctaggcgnangnaggtgttgcagccgccggagancanatagctgncggcatgatgantntgnagcnagaanttgaacttggcgtcngaagcgnncgccncggattcccccgtaggagctgggtcncnaagggaatgtgttcgcngtnaatncccntngattggcctnagccattcnacagncnccnac

SEQ ID NO: 11 - DNA, 590 bp, Homo Sapiens
  misc_feature (433)..(433): n is a, c, g, or t
  misc_feature (501)..(501): n is a, c, g, or t
  misc_feature (538)..(539): n is a, c, g, or t
  misc_feature (550)..(550): n is a, c, g, or t
  misc_feature (552)..(553): n is a, c, g, or t
  misc_feature (556)..(556): n is a, c, g, or t
  misc_feature (563)..(564): n is a, c, g, or t
  misc_feature (568)..(569): n is a, c, g, or t
  misc_feature (571)..(571): n is a, c, g, or t
  misc_feature (581)..(581): n is a, c, g, or t
  misc_feature (590)..(590): n is a, c, g, or t
tagagagattactatgagaggatcgcatcaccatcaccatcacggatcctatttaggtgacactatagaatcgtcgacccacgcgtccgcgggacgcgcttggccttgcccgcgcccgctcgcctcgtctcgcccggcctccccgcgtcgcctcgtcgcctgttccgcgccaggcatggcccccagcactgtggccgtggagctgctcagccccaaagagaaaaaccgactgcggaagccggtggtggagaagatgcgccgcgaccgcatcaacagcagcatcgagcagctgaagctgctgctggagcaggagttcgcgcggcaccagcccaactccaagctggagaaggccgacatcctggagatggctgtcagctacctgaagcacagcaaagccttcgtcgccgccgccggccccaagagcctgcaccangactacagcgaaggctactcgtggtgcctgcaggaggccgtgcagttcctgacgctccacgccgccancgacacgcaaatgaagctgctgtaccacttccagtgnnctccggccgcncnngcngtgcccnncaannancccaaggcancaggcgccn

SEQ ID NO: 12 - DNA, 869 bp, Homo Sapiens
  misc_feature (587)..(587): n is a, c, g, or t
  misc_feature (614)..(614): n is a, c, g, or t
  misc_feature (661)..(661): n is a, c, g, or t
  misc_feature (701)..(701): n is a, c, g, or t
  misc_feature (730)..(730): n is a, c, g, or t
  misc_feature (740)..(740): n is a, c, g, or t
  misc_feature (743)..(743): n is a, c, g, or t
  misc_feature (751)..(751): n is a, c, g, or t
  misc_feature (754)..(754): n is a, c, g, or t
  misc_feature (757)..(757): n is a, c, g, or t
  misc_feature (759)..(759): n is a, c, g, or t
  misc_feature (762)..(762): n is a, c, g, or t
  misc_feature (783)..(783): n is a, c, g, or t
  misc_feature (791)..(791): n is a, c, g, or t
  misc_feature (825)..(825): n is a, c, g, or t
  misc_feature (829)..(830): n is a, c, g, or t
  misc_feature (835)..(835): n is a, c, g, or t
  misc_feature (838)..(838): n is a, c, g, or t
  misc_feature (841)..(841): n is a, c, g, or t
  misc_feature (848)..(848): n is a, c, g, or t
  misc_feature (850)..(850): n is a, c, g, or t
  misc_feature (856)..(856): n is a, c, g, or t
  misc_feature (862)..(862): n is a, c, g, or t
  misc_feature (869)..(869): n is a, c, g, or t
tagagaaattactatgagaggatcgcatcaccatcaccatcacggatcctatttaggtgacactatagaatcgtcgacccacgcgtccgcctcgacaacctatcgaaggcgccatggagcgaccggcgcccctggccgtgcttcccttctcggaccccgcgcacgccctgagcctgctgcgcggcctgagccagctgcgcgccgagcgcaagttcctggacgtgaccctggaggcggcgggcgggcgcgacttcccggcgcaccgtgcggtgctggccgccgccagcccctacttccgcgccatgttcgcggggcagctgcgcgagagccgcgccgagcgggtgcgcctgcacggagtgcctcccgacatgctgcagctgctgctggacttcagctacacgggccgcgtggcggtaagcggcgacaacgctgagccgctgctgcgcgccgccgacctgctgcagttcccggccgtgaaggaggcgtgcggggccttcctgcagcagcagctcgacctggccaactgcctggacatgcaggacttcgctgaggccttcagctgctcgggactggcgagcgcggcgcancggttcattctgcgccacgtgggcganctgggcgccgagcagctggagcggctgccactggcgcgcctgctgcnctacctgcgggacgacgggctgtgtgtgcccaaggaggangccgcctaccagctggcgctgcgctgggnccgcgctganccnccgcgccncgncgngncanttgggccgcaactgctggaangccgtgcncctgcccttcgttgcgcccgcttctacctgatgncgcnnattcnagnccnaacccgntngtggangcgctncccaccn

SEQ ID NO: 13 - DNA, 1127 bp, Homo Sapiens
  misc_feature (887)..(887): n is a, c, g, or t
  misc_feature (891)..(891): n is a, c, g, or t
  misc_feature (927)..(927): n is a, c, g, or t
  misc_feature (951)..(951): n is a, c, g, or t
  misc_feature (963)..(963): n is a, c, g, or t
  misc_feature (990)..(990): n is a, c, g, or t
  misc_feature (1044)..(1044): n is a, c, g, or t
  misc_feature (1047)..(1047): n is a, c, g, or t
  misc_feature (1049)..(1049): n is a, c, g, or t
  misc_feature (1055)..(1055): n is a, c, g, or t
  misc_feature (1060)..(1060): n is a, c, g, or t
  misc_feature (1062)..(1062): n is a, c, g, or t
  misc_feature (1064)..(1064): n is a, c, g, or t
  misc_feature (1067)..(1067): n is a, c, g, or t
  misc_feature (1073)..(1073): n is a, c, g, or t
  misc_feature (1082)..(1082): n is a, c, g, or t
  misc_feature (1093)..(1093): n is a, c, g, or t
  misc_feature (1095)..(1095): n is a, c, g, or t
  misc_feature (1098)..(1098): n is a, c, g, or t
  misc_feature (1107)..(1107): n is a, c, g, or t
  misc_feature (1115)..(1115): n is a, c, g, or t
  misc_feature (1117)..(1117): n is a, c, g, or t
  misc_feature (1120)..(1120): n is a, c, g, or t
  misc_feature (1127)..(1127): n is a, c, g, or t
aatagagagattactatgagaggatcgcatcaccatcaccatcacggatcctatttaggtgacactatagaatcgtcgacccacgcgtccgtgagtctcaagatggacaaccgggatgttgcaggaaaggctaaccggtggtttggggttgctccccctaaatctggaaaaatgaacatgaacatccttcaccaggaagagctcatcgctcagaagaaacgggaaattgaagccaaaatggaacagaaagccaagcagaatcaggtggccagccctcagcccccacatcctggcgaaatcacaaatgcacacaactcttcctgcatttccaacaagtttgccaacgatggtagcttcttgcagcagtttctgaagttgcagaaggcacagaccagcacagacgccccgaccagtgcgcccagcgcccctcccagcacacccacccccagcgctgggaagaggtccctgctcatcagcaggcggacaggcctggggctggccagcctgccgggccctgtgaagagctactcccacgccaagcagctgcccgtggcgcaccgcccgagtgtcttccagtcccctgacgaggacgaggaggaggactatgagcagtggctggagatcaaagtttcacccccagagggagccgagactcggaaagtgatagagaaattggcccgctttgtggcagaaggaggccccgagttagaaaaagtagctatggaggactacaaggataacccagcatttgcatttttgcacgataagaatagcagggaattcctctactacaggaagaaggtggctgagataagaaaggaagcacagaagtcgcaggcagcctctcaaaagtttcacccccagaggacgaagaggtcaagaacctngcanaaaagttggccaggttcatagcggaacgggggtccnaaggtggaaaccattgccctccanaacaaccgtganaaccaggcattcagctttctgtatgancccaatagccaagggtacaagtactaccgacagaacctggaggaattccggaangcnangccagntcccnangnagnttcaancacttgatnccggcctgaancnaanttcccctcntgaggccntntanggtcttn

SEQ ID NO: 14 - DNA, 1125 bp, Homo Sapiens
  misc_feature (232)..(232): n is a, c, g, or t
  misc_feature (475)..(475): n is a, c, g, or t
  misc_feature (553)..(553): n is a, c, g, or t
  misc_feature (596)..(596): n is a, c, g, or t
  misc_feature (608)..(608): n is a, c, g, or t
  misc_feature (635)..(635): n is a, c, g, or t
  misc_feature (649)..(649): n is a, c, g, or t
  misc_feature (657)..(657): n is a, c, g, or t
  misc_feature (715)..(715): n is a, c, g, or t
  misc_feature (730)..(730): n is a, c, g, or t
  misc_feature (735)..(735): n is a, c, g, or t
  misc_feature (747)..(747): n is a, c, g, or t
  misc_feature (752)..(752): n is a, c, g, or t
  misc_feature (765)..(766): n is a, c, g, or t
  misc_feature (779)..(779): n is a, c, g, or t
  misc_feature (787)..(788): n is a, c, g, or t
  misc_feature (827)..(828): n is a, c, g, or t
  misc_feature (843)..(843): n is a, c, g, or t
  misc_feature (845)..(845): n is a, c, g, or t
  misc_feature (861)..(861): n is a, c, g, or t
  misc_feature (882)..(882): n is a, c, g, or t
  misc_feature (886)..(886): n is a, c, g, or t
  misc_feature (889)..(889): n is a, c, g, or t
  misc_feature (899)..(900): n is a, c, g, or t
  misc_feature (908)..(909): n is a, c, g, or t
  misc_feature (911)..(913): n is a, c, g, or t
  misc_feature (929)..(929): n is a, c, g, or t
  misc_feature (933)..(933): n is a, c, g, or t
  misc_feature (942)..(942): n is a, c, g, or t
  misc_feature (948)..(948): n is a, c, g, or t
  misc_feature (956)..(957): n is a, c, g, or t
  misc_feature (970)..(970): n is a, c, g, or t
  misc_feature (976)..(976): n is a, c, g, or t
  misc_feature (985)..(986): n is a, c, g, or t
  misc_feature (991)..(991): n is a, c, g, or t
  misc_feature (1001)..(1001): n is a, c, g, or t
  misc_feature (1006)..(1006): n is a, c, g, or t
  misc_feature (1008)..(1008): n is a, c, g, or t
  misc_feature (1016)..(1016): n is a, c, g, or t
  misc_feature (1024)..(1024): n is a, c, g, or t
  misc_feature (1032)..(1032): n is a, c, g, or t
  misc_feature (1041)..(1042): n is a, c, g, or t
  misc_feature (1049)..(1050): n is a, c, g, or t
  misc_feature (1052)..(1052): n is a, c, g, or t
  misc_feature (1054)..(1054): n is a, c, g, or t
  misc_feature (1065)..(1065): n is a, c, g, or t
  misc_feature (1067)..(1067): n is a, c, g, or t
  misc_feature (1075)..(1075): n is a, c, g, or t
  misc_feature (1078)..(1078): n is a, c, g, or t
  misc_feature (1090)..(1090): n is a, c, g, or t
  misc_feature (1094)..(1094): n is a, c, g, or t
  misc_feature (1104)..(1105): n is a, c, g, or t
  misc_feature (1116)..(1117): n is a, c, g, or t
gaatagagagattactatgagaggatcgcatcaccatcaccatcacggatcctatttaggtgacactatagaatcgtcgacccacgcgtccgggtttggttgtgagatcgagaataacagaagcagcggagcattctggaaatattactatgatggaaaggactacattgaattcaacaaagaaatcccagcctgggtccccttcgacccagcagcccagataaccaagcanaagtgggaggcagaaccagtctacgtgcagcgggccaaggcttacctggaggaggagtgccctgcgactctgcggaaatacctgaaatacagcaaaaatatcctggaccggcaagatcctccctctgtggtggtcaccagccaccaggccccaggagaaaagaagaaactgaagtgcctggcctacgacttctacccagggaaaattgatgtgcactggactcgggccggcgaggtgcaggancctgagttacggggagatgttcttcacaatggaaatggcacttaccagtcctgggtggtggtggcagtgcccccgcangacacagccccctactcctgccacgtgcagcacagcagcctgncccagcccctcntggtgccctgggaggccagctaggaancaagggttggaggnaatgtggnatctcaaacccagtaagctgcccttcctgcctgatgtgggagctgaaccacagaaatncacatgtcaatgganccacnaggccctgaagnagcantgtgggggggacnnaacaggaggttgnatttggannaccgaaagactgggatgcctgtcttgaagtataacttgnnacccaaaaaaaatcntntcacccttgagccccncccccaccccccttggtctantctngtnagaagctaannaaaataanncnnnccctcctttccctaancaanaaaaatgantaatanactaaaannttattttctactnagggcnggccccccnnccatnaaggagtccncaatnanatcttaantcaccttnatctttgncaccctgtnnaaaaaanncncnaaattgactcncnaacctccnttncgaattgttttnaaanactctcgttnngccccggcgtnnattttttt

SEQ ID NO: 15 - DNA, 264 bp, Homo Sapiens
  misc_feature (18)..(18): n is a, c, g, or t
  misc_feature (47)..(47): n is a, c, g, or t
  misc_feature (86)..(86): n is a, c, g, or t
  misc_feature (111)..(111): n is a, c, g, or t
  misc_feature (114)..(115): n is a, c, g, or t
  misc_feature (119)..(119): n is a, c, g, or t
  misc_feature (123)..(123): n is a, c, g, or t
  misc_feature (126)..(126): n is a, c, g, or t
  misc_feature (128)..(128): n is a, c, g, or t
  misc_feature (131)..(131): n is a, c, g, or t
  misc_feature (139)..(139): n is a, c, g, or t
  misc_feature (150)..(150): n is a, c, g, or t
  misc_feature (153)..(153): n is a, c, g, or t
  misc_feature (197)..(197): n is a, c, g, or t
  misc_feature (200)..(202): n is a, c, g, or t
  misc_feature (215)..(215): n is a, c, g, or t
  misc_feature (220)..(220): n is a, c, g, or t
  misc_feature (250)..(250): n is a, c, g, or t
  misc_feature (253)..(253): n is a, c, g, or t
  misc_feature (259)..(259): n is a, c, g, or t
  misc_feature (264)..(264): n is a, c, g, or t
gaattagaggagaattanctatggaggaggatcgccatcaccactcncccattcacggggatcctatttagggtggacactaatanaatcggtcgacccacgcgtccgggnagnntgtnagcngtngncgnctgccaanatgccaccccnggngtcgggttgcgccatgctgcgagcagcgagtgagcctgtaccanccnnnctctgtagtcttntgagnaggattccactcctgtgtcctgtgcgtacnaanatgaancggtn

SEQ ID NO: 16 - DNA, 1116 bp, Homo Sapiens
  misc_feature (911)..(911): n is a, c, g, or t
  misc_feature (920)..(920): n is a, c, g, or t
  misc_feature (927)..(927): n is a, c, g, or t
  misc_feature (940)..(940): n is a, c, g, or t
  misc_feature (946)..(946): n is a, c, g, or t
  misc_feature (964)..(964): n is a, c, g, or t
  misc_feature (970)..(970): n is a, c, g, or t
  misc_feature (972)..(972): n is a, c, g, or t
  misc_feature (984)..(984): n is a, c, g, or t
  misc_feature (1004)..(1004): n is a, c, g, or t
  misc_feature (1016)..(1016): n is a, c, g, or t
  misc_feature (1021)..(1021): n is a, c, g, or t
  misc_feature (1029)..(1029): n is a, c, g, or t
  misc_feature (1032)..(1032): n is a, c, g, or t
  misc_feature (1037)..(1037): n is a, c, g, or t
  misc_feature (1046)..(1046): n is a, c, g, or t
  misc_feature (1053)..(1053): n is a, c, g, or t
  misc_feature (1055)..(1055): n is a, c, g, or t
  misc_feature (1062)..(1062): n is a, c, g, or t
  misc_feature (1070)..(1071): n is a, c, g, or t
  misc_feature (1082)..(1083): n is a, c, g, or t
  misc_feature (1085)..(1085): n is a, c, g, or t
  misc_feature (1088)..(1088): n is a, c, g, or t
  misc_feature (1099)..(1100): n is a, c, g, or t
  misc_feature (1103)..(1103): n is a, c, g, or t
  misc_feature (1109)..(1109): n is a, c, g, or t
  misc_feature (1111)..(1111): n is a, c, g, or t
  misc_feature (1114)..(1115): n is a, c, g, or t
attagagaaattactatgagaggatcgcatcaccatcaccatcacggatcctatttaggtgacactatagaatcgtcgacccacgcgtccgaaaaaaccaaccaaaccaagaggcatccaaccaagtccaagtcccgcgtcccggccacacgcccgcaccgagggagcacgccggcaggggcgccgaggagcggccccaggacaggacggccccaccgcgtcctggctggcagcacagtgggaacacgcccctccgtctcaggcagtgggggagttggaggggaaggggcctcccttgtgggacccgtggggggctctgttttccatccagtcttcctttcccagcccccaactcccaagacagacagtgtggagcccagcggcggcggagcaggcccgggcctgagcaggcaggcgctgctagcaagacttgatctttgtggccagctgtgccagggggccggcggggctgaggggtgcgggcagctttcatcccaggggctccactgggccccgtcaccctcctgtcgcgtcccctgcgtcccacctccctcctgcccggcagtcccgcccgtgcccccagcctggcgaggaagccgtccaacagtagccccggggccagctcccaacagaaagggctgacgtggctccaggactcaggggcgctccatgggaggacgaaggaagcccagccagccaggagccactcctcacacctccaagtgtggccaagtgggccctgaggccaaggacttacttgctcttcctggccatctctccctttctggaggaggcccggggcctgtgtacaccaaggctgacctcgtgctgcctgctgggacccagccctccctgccgctcccctgtgagcccagtccaccgtgggcgcccagggccagggaacgggccancgcccgggntgcatcncgaggttgggaantcacantggctgtgggccttggangggcananccaaaacagggncccatgggaaagggcaaggnatggggaaaacntgggncgggcccnttncttgntccaaaggnaggtttncnggttggngggaacannaccaaggaaanncnagntttaacccggnnggnaaaaananaanna

SEQ ID NO: 17 - DNA, 1165 bp, Homo Sapiens
  misc_feature (1)..(2): n is a, c, g, or t
  misc_feature (916)..(916): n is a, c, g, or t
  misc_feature (949)..(950): n is a, c, g, or t
  misc_feature (983)..(983): n is a, c, g, or t
  misc_feature (987)..(987): n is a, c, g, or t
  misc_feature (989)..(990): n is a, c, g, or t
  misc_feature (992)..(992): n is a, c, g, or t
  misc_feature (1014)..(1014): n is a, c, g, or t
  misc_feature (1027)..(1027): n is a, c, g, or t
  misc_feature (1040)..(1040): n is a, c, g, or t
  misc_feature (1043)..(1043): n is a, c, g, or t
  misc_feature (1048)..(1048): n is a, c, g, or t
  misc_feature (1050)..(1050): n is a, c, g, or t
  misc_feature (1054)..(1054): n is a, c, g, or t
  misc_feature (1058)..(1058): n is a, c, g, or t
  misc_feature (1060)..(1060): n is a, c, g, or t
  misc_feature (1087)..(1087): n is a, c, g, or t
  misc_feature (1101)..(1101): n is a, c, g, or t
  misc_feature (1107)..(1107): n is a, c, g, or t
  misc_feature (1129)..(1129): n is a, c, g, or t
  misc_feature (1131)..(1131): n is a, c, g, or t
  misc_feature (1139)..(1139): n is a, c, g, or t
  misc_feature (1146)..(1146): n is a, c, g, or t
nnattagagaaattactatgagaggatcgcatcaccatcaccatcacggatcctatttaggtgacactatagaatcgtcgacccacgcgtccgcggaagcgggggtgcagcgcggcagaatgagggttgattcctcggctgaccccacaatgtcgcaggagcaagggccggggtcctccacgcctcccagttctccgacacttcttgacgctctgctccagaacctttacgactttggaggtacagaaggtgaaacagaacagaagaagatcataaagaaaagggaaaacaagaagagagatgtgatggcttcagcggccttggcagcagagccatctcccctacctggttctctcataagaggccagaggaagagcgcttcgagcttcttcaaggaacttagagaagagcggcattgtgctccttctgggacccccacaggaccagagatccttgctgctgcagttcctccctcttccctaaagaacaatagggaacaagtagaagtggtagaatttcacagcaataaaaaaagaaaattgacgccagatcataacaagaacacaaaggctaatcctagtgttttggagagagatgtggatacacaagaatttaacctagaaaaagctcgtttagaagtgcaccggtttggtatcacgggttatggaaaaggaaaggagagaatcctggaacaggaacgtgccattatgctgggcgctaagcctcctaaaaagagttatgtgaattacaaggttttacaggagcaaattaaagaaaaaaaggcagcaaaggaagaagaaaagagactggcccaagaaaacagatattttcaagaaaagaagaggaaaggacaggaggacaggaaatccaaaaaagaagtccgctcccagtattttgtcaaatggacggattgganaggttggaaaaattcaaaaatggaacactgatnntgagccccagttgatatcaagaaaaataaattncttncnnanggggccaaatgaaagtactttngtcaaataaaacngaggatggggaanaanttgantncaantggnancgggcccttggaaccctgggggaactntaaaaaaaattcgntttttnaaacccccatttcccaaaactngntttttttnttttttnaaaaaaaaaaggtccaacc

SEQ ID NO: 18 - DNA, 1278 bp, Homo Sapiens
  misc_feature (960)..(960): n is a, c, g, or t
  misc_feature (980)..(980): n is a, c, g, or t
  misc_feature (983)..(983): n is a, c, g, or t
  misc_feature (991)..(991): n is a, c, g, or t
  misc_feature (1029)..(1029): n is a, c, g, or t
  misc_feature (1041)..(1041): n is a, c, g, or t
  misc_feature (1062)..(1062): n is a, c, g, or t
  misc_feature (1074)..(1074): n is a, c, g, or t
  misc_feature (1076)..(1078): n is a, c, g, or t
  misc_feature (1084)..(1084): n is a, c, g, or t
  misc_feature (1090)..(1090): n is a, c, g, or t
  misc_feature (1101)..(1101): n is a, c, g, or t
  misc_feature (1107)..(1107): n is a, c, g, or t
  misc_feature (1114)..(1114): n is a, c, g, or t
  misc_feature (1142)..(1143): n is a, c, g, or t
  misc_feature (1145)..(1145): n is a, c, g, or t
  misc_feature (1149)..(1149): n is a, c, g, or t
  misc_feature (1153)..(1153): n is a, c, g, or t
  misc_feature (1156)..(1156): n is a, c, g, or t
  misc_feature (1161)..(1161): n is a, c, g, or t
  misc_feature (1178)..(1178): n is a, c, g, or t
  misc_feature (1192)..(1192): n is a, c, g, or t
  misc_feature (1200)..(1200): n is a, c, g, or t
  misc_feature (1203)..(1203): n is a, c, g, or t
  misc_feature (1210)..(1210): n is a, c, g, or t
  misc_feature (1216)..(1216): n is a, c, g, or t
  misc_feature (1222)..(1222): n is a, c, g, or t
  misc_feature (1238)..(1238): n is a, c, g, or t
  misc_feature (1260)..(1260): n is a, c, g, or t
  misc_feature (1271)..(1271): n is a, c, g, or t
  misc_feature (1278)..(1278): n is a, c, g, or t
caatagagagattactatgagaggatcgcatcaccatcaccatcacggatcctatttaggtgacactatagaatcgtcgacccacgcgtccgggtacctgctctgcgaactggtgtctgacgacccccgctgccgcctaagcctcgatgaccgagttctgagcagcctcgtacgggacacgatcgccagggtgcacggaactttcggcgcagccgcctgctccatcggcttcgcgggtgcaagggcgctgggggaagaggggaacccgggaggatggcgggatgtggagggggcaggcgccggaggaagaaagaaggggcacgagtggccaagcccgtgcaccgttttttgtaaggtatctctttaagcgcctgggaccccaagcgagagtccgaaattagcagagcgctaaaaggaggggcccgaaggcagtggggctttgagctagaagcctctttttacctgcttgacaggtaatttctgtaattggttgtgattgaatttgatagggtagagaattaaatgagggaagctgtgtatacttcctagtaagagctattatatgaccgattacattaacatcatatggaaaaaaattgtcaaaagtactccgggaaagcccttaaatagttggtaaagtacagaacacatgattgtcaatatatgtaaatacaggatgagctaggacagaggggcccttctttcacaccacttaaattagttcccactttaaccttgtttgagattgacttctggagagttaaatgcagatagacttaactctcctaagtcaggtgagactgagagctgactgctacaataaattacggagcccaaatgcagtaaaacagcctgtttttcaggcaagggttttgtgggggttttttcctaaaattaaaacggatcgcctcctacctgctcctatttattgaattaactagtgaattaaaaagcatttcnattctaaattcattccccanttntgaatggngtgcaacacagtggggggtttggcttttccctttaacnccctgaaaaatntaagtgcccttgcctaaaaanatactttttggnannnaaatangccctnttaccccaaanttttcnttttttncaaaaaaatctgggctttttcccaagcnngntggnaggnccncaccnaaaacgggggtcattgntgcccccgcccccnggggttcnggnaattccngccccncccccngggggggggaaataanggggcccccccccccccctaanttttttttttntaaaaan

SEQ ID NO: 19 - DNA, 360 bp, Homo Sapiens
  misc_feature (34)..(34): n is a, c, g, or t
  misc_feature (37)..(37): n is a, c, g, or t
  misc_feature (42)..(42): n is a, c, g, or t
  misc_feature (47)..(47): n is a, c, g, or t
  misc_feature (56)..(56): n is a, c, g, or t
  misc_feature (62)..(64): n is a, c, g, or t
  misc_feature (73)..(73): n is a, c, g, or t
  misc_feature (75)..(75): n is a, c, g, or t
  misc_feature (90)..(90): n is a, c, g, or t
  misc_feature (94)..(94): n is a, c, g, or t
  misc_feature (101)..(101): n is a, c, g, or t
  misc_feature (104)..(104): n is a, c, g, or t
  misc_feature (108)..(108): n is a, c, g, or t
  misc_feature (111)..(112): n is a, c, g, or t
  misc_feature (118)..(118): n is a, c, g, or t
  misc_feature (122)..(122): n is a, c, g, or t
  misc_feature (129)..(130): n is a, c, g, or t
  misc_feature (134)..(134): n is a, c, g, or t
  misc_feature (144)..(144): n is a, c, g, or t
  misc_feature (151)..(151): n is a, c, g, or t
  misc_feature (154)..(154): n is a, c, g, or t
  misc_feature (167)..(167): n is a, c, g, or t
  misc_feature (182)..(182): n is a, c, g, or t
  misc_feature (209)..(209): n is a, c, g, or t
  misc_feature (216)..(216): n is a, c, g, or t
  misc_feature (218)..(218): n is a, c, g, or t
  misc_feature (226)..(226): n is a, c, g, or t
  misc_feature (228)..(228): n is a, c, g, or t
  misc_feature (236)..(236): n is a, c, g, or t
  misc_feature (239)..(239): n is a, c, g, or t
  misc_feature (260)..(261): n is a, c, g, or t
  misc_feature (274)..(274): n is a, c, g, or t
  misc_feature (283)..(283): n is a, c, g, or t
  misc_feature (285)..(285): n is a, c, g, or t
  misc_feature (291)..(291): n is a, c, g, or t
  misc_feature (297)..(297): n is a, c, g, or t
  misc_feature (324)..(324): n is a, c, g, or t
  misc_feature (332)..(332): n is a, c, g, or t
  misc_feature (343)..(343): n is a, c, g, or t
  misc_feature (349)..(349): n is a, c, g, or t
gagagaattacctatgagtaggatggcatcaccntcnccttnacggnttctatttnggtgannntatacaatngncgaccctcgcggtcngcgnatggagngtnttgncanncgtggnaccntcccagnnctantgcgcaccancgcctgncgnagtgctcttctgngcggtggaccacgancagctgagccgagagctgcaggcccgnctggtcnanctgaacgncnaaggaccnganccgctgggattacgacttccnncaggacatgccgntgcgggttncntggacncctgcnatggaccgaacatggacagcgacttgntgcccgcnttctacaagtnatacantgaaacgtggg

SEQ ID NO: 20 - DNA, 1022 bp, Homo Sapiens
  misc_feature (860)..(860): n is a, c, g, or t
  misc_feature (975)..(975): n is a, c, g, or t
  misc_feature (999)..(1022): n is a, c, g, or t
agagagattactatgagaggatcgcatcaccatcaccatcacggatcctatttaggtgacactatagaatcgtcgacccacgcgtccgccctgaacttggatgattatatcgatgcagaacacctgggtgacttccacaggacctacaagaacagtgaggagcttcggtctcgtattgtgtctggaatcatcacacctatccatgagcagtgggaaaaggctaatgtaagcagtccccaccgggagttcccccctgctaccgccagagaggtggacccactccggattcctccacgccacccacacaccagtcggcagcctccctggtgtgatcccctgggcccgtttgttgtcgggggagaagacttagacccttttgggcctcggagaggtggcatgattgtggatcccctgagatctggcttcccaagagcacttattgacccttcctcaggcctcccgaaccgacttcctccaggcgctgtgcccccaggagctcgctttgacccctttggacccattgggaccagcccacccggacctaacccagaccatctccccccgccgggctacgatgacatgtacctgtgaaggcctcaagaatgtaacatcccaggcttccctccattctcctggagctgccaccgctgtccccatcagcaaccatgttcttgcaggctgggggcaagggattctgctcatgtgtttgcagaccggctgggatagcctccccaccccttatcagagccaagacacctgctgcagctctccacctagctgcagatagctcccaaagagaaatcagtgtgtctctttcaccatcagctcctcccctttcaccaccagctcctctccacttncccaagggagactccggcaaccttcagcaacatatatcctcgaacaagatgcagtgctataaaaacagaacgcattttggatgttattattaaaaccaaatgtcaatacagaatncatgttgccgtttaaaaaaaaaannnnnnnnnnnnnnnnnnnnnnnn

SEQ ID NO: 21 - DNA, 1214 bp, Homo Sapiens
  misc_feature (1006)..(1006): n is a, c, g, or t
  misc_feature (1043)..(1043): n is a, c, g, or t
  misc_feature (1069)..(1069): n is a, c, g, or t
  misc_feature (1085)..(1085): n is a, c, g, or t
  misc_feature (1088)..(1088): n is a, c, g, or t
  misc_feature (1098)..(1098): n is a, c, g, or t
  misc_feature (1103)..(1103): n is a, c, g, or t
  misc_feature (1112)..(1112): n is a, c, g, or t
  misc_feature (1116)..(1116): n is a, c, g, or t
  misc_feature (1118)..(1118): n is a, c, g, or t
  misc_feature (1121)..(1121): n is a, c, g, or t
  misc_feature (1127)..(1127): n is a, c, g, or t
  misc_feature (1136)..(1136): n is a, c, g, or t
  misc_feature (1140)..(1140): n is a, c, g, or t
  misc_feature (1142)..(1142): n is a, c, g, or t
  misc_feature (1152)..(1152): n is a, c, g, or t
  misc_feature (1161)..(1161): n is a, c, g, or t
  misc_feature (1164)..(1164): n is a, c, g, or t
  misc_feature (1172)..(1173): n is a, c, g, or t
  misc_feature (1184)..(1184): n is a, c, g, or t
  misc_feature (1191)..(1191): n is a, c, g, or t
  misc_feature (1194)..(1194): n is a, c, g, or t
  misc_feature (1198)..(1198): n is a, c, g, or t
  misc_feature (1200)..(1200): n is a, c, g, or t
  misc_feature (1205)..(1205): n is a, c, g, or t
  misc_feature (1211)..(1211): n is a, c, g, or t
tagagaaattactatgagaggatcgcatcaccatcaccatcacggatcctatttaggtgacactatagaatcgtcgacccacgcgtccgagcagcttgaacaagtcctgtcaaaaaaactggaggaggttgaaggtgaaatatccagttaccaggatgcaattgagattgaactagaaaacagccggccaaaggccaaggggggcctggccagcctggcaaaagatggctccaccgaggacaccgcgtccagcttgtgtggcgaggaggacacagaggacgaggagctggaagccgcggccagccacctgaacaaagacttataccgggagctccttggtggtgcccccggcagctcggaagcagcaggaagccccgagtggggcggcagacctccggccctggggtccctgctggaccccctccccactgcagccagcctgggcatctcagactccatccgcgaatgcatctcctctcagagcagcgaccccaaagatgcttcaggagacggtgagctggacctcagtggcattgatgacctggagattgacaggtacatcctgaatgagtcggaagcccgcgtgaaggccgagctgtggatgagggagaacgccgagtacctgcgggaacagagggaaaaagaagcaagaatagcgaaagagaaggagctcggcatctacaaggaacacaagcccaagaagtcttgcaagcgacgggagccaattcaggccagtaccgccagggaggccatcgagaagatgctggagcagaagaagatctccagcaagatcaattatagcgtgctccggggcctcagcagcgccggcgggggcagtccgcacagggaggatgcacagcgccgagactcctggtgacaggtggcacctgtcccacagccctcgtcccatgtggaacttaccattgggattgtgtttctattcagcaagggaaaccggaccaagcgtctgcatgtgtgtgatcaaatgtgggccgggtgtgtgcanggctgggtcccgctgcctgccgtcaactcatccaagnacctcccaggctggcatgtggtgttnctactattaaggaaanagncttggggcanccccntgctggtcnaatntntgnaggctnaattgctgncctntnatcagacaantttgaattncanccacctcnnacgtccctttnaaaaatnggnccananctttncaaagnaac

SEQ ID NO: 22 - DNA, 449 bp, Homo Sapiens
atagagaaattactatgagaggatcgcatcaccatcaccatcacggatcctatttaggtgacactatagaatcgtcgacccacgcgtccgcccacgcgtccgccctcatccacgatggcctagcacgtggaattcgcgaagctgccaaagccttagacaagcgccaagcccatctttgtgtgcttgcatccaactgtgatgagcctatgtatgtcaagttggtggaggccctttgtgctgaacaccaaatcaacctaattaaggttgatgacaacaagaaactaggagaatgggtaggcctttgtaaaattgacagagaggggaaaccccgtaaagtggttggttgcagttgtgtagtagttaaggactatggcaaggagtctcaggccaaggatgtcattgaagagtatttcaaatgcaagaaatgaagaaataaatctttggctcac

SEQ ID NO: 23 - DNA, 961 bp, Homo Sapiens
  misc_feature (1)..(1): n is a, c, g, or t
  misc_feature (937)..(937): n is a, c, g, or t
ntagagatattactatgagaggatcgcatcaccatcaccatcacggatcctatttaggtgacactatagaatcgtcgacccacgcgtccgcgccgcccaagatgccgaaaggaaagaaggccaagggaaagaaggtggctccggccccagctgtcgtgaagaagcaggaggctaagaaagtggtgaatcccctgtttgagaaaaggcctaagaattttggcattggacaggacatccagcccaaaagagacctcacccgctttgtgaaatggccccgctatatcaggttgcagcggcagagagccatcctctataagcggctgaaagtgcctcctgcgattaaccagttcacccaggccctggaccgccaaacagctactcagctgcttaagctggcccacaagtacagaccagagacaaagcaagagaagaagcagagactgttggcccgggccgagaagaaggctgctggcaaaggggacgtcccaacgaagagaccacctgtccttcgagcaggagttaacaccgtcaccaccttggtggagaacaagaaagctcagctggtggtgattgcacacgacgtggatcccatcgagctggttgtcttcttgcctgccctgtgtcgtaaaatgggggtcccttactgcattatcaagggaaaggcaagactgggacgtctagtccacaggaagacctgcaccactgtcgccttcacacaggtgaactcggaagacaaaggcgctttggctaagctggtggaagctatcaggaccaattacaatgacagatacgatgagatccgccgtcactggggtggcaatgtcctgggtcctaagtctgtggctcgtatcgccaagctcgaaaaggcaaaggctaaagaacttgccactaaactgggttaaatgtacactgttgagttttctgtacataaaaatanttgaaataatacaaattttccttc

SEQ ID NO: 24 - DNA, 1182 bp, Homo Sapiens
  misc_feature (1)..(1): n is a, c, g, or t
  misc_feature (4)..(12): n is a, c, g, or t
  misc_feature (22)..(22): n is a, c, g, or t
  misc_feature (819)..(819): n is a, c, g, or t
  misc_feature (884)..(884): n is a, c, g, or t
  misc_feature (888)..(888): n is a, c, g, or t
  misc_feature (890)..(890): n is a, c, g, or t
  misc_feature (896)..(896): n is a, c, g, or t
  misc_feature (899)..(899): n is a, c, g, or t
  misc_feature (934)..(934): n is a, c, g, or t
  misc_feature (948)..(948): n is a, c, g, or t
  misc_feature (970)..(970): n is a, c, g, or t
  misc_feature (972)..(972): n is a, c, g, or t
  misc_feature (984)..(984): n is a, c, g, or t
  misc_feature (987)..(987): n is a, c, g, or t
  misc_feature (999)..(999): n is a, c, g, or t
  misc_feature (1005)..(1005): n is a, c, g, or t
  misc_feature (1010)..(1010): n is a, c, g, or t
  misc_feature (1019)..(1019): n is a, c, g, or t
  misc_feature (1043)..(1043): n is a, c, g, or t
  misc_feature (1046)..(1046): n is a, c, g, or t
  misc_feature (1053)..(1053): n is a, c, g, or t
  misc_feature (1065)..(1065): n is a, c, g, or t
  misc_feature (1070)..(1070): n is a, c, g, or t
  misc_feature (1079)..(1079): n is a, c, g, or t
  misc_feature (1082)..(1082): n is a, c, g, or t
  misc_feature (1086)..(1086): n is a, c, g, or t
  misc_feature (1104)..(1104): n is a, c, g, or t
  misc_feature (1121)..(1121): n is a, c, g, or t
  misc_feature (1133)..(1133): n is a, c, g, or t
  misc_feature (1139)..(1139): n is a, c, g, or t
  misc_feature (1142)..(1142): n is a, c, g, or t
  misc_feature (1155)..(1156): n is a, c, g, or t
  misc_feature (1164)..(1165): n is a, c, g, or t
  misc_feature (1168)..(1168): n is a, c, g, or t
  misc_feature (1170)..(1170): n is a, c, g, or t
  misc_feature (1172)..(1172): n is a, c, g, or t
nttnnnnnnnnnaattagaganattactatgagaggatcgcatcaccatcaccattcacggatcctatttaggtgacactatagaatcgtcgacccacgcgtccgcccacgcgtccggggacaacggccacctgtaccgggaggaccagacctcccccgcgccgggcctccgctgcctcaactggctggacgcgcagagcgggctggcctcggcccccgtgtcgggggccggcaatcacagttactgccgaaacccggacgaggacccgcgcgggccctggtgctacgtcagtggcgaggccggcgtccctgagaaacggccttgcgaggacctgcgctgtccagagaccacctcccaggccctgccagccttcacgacagaaatccaggaagcgtctgaagggccaggtgcagatgaggtgcaggtgttcgctcctgccaacgccctgcccgctcggagtgaggcggcagctgtgcagccagtgattgggatcagccagcgggtgcggatgaactccaaggagaaaaaggacctgggaactctggggggaaggatttgaaagaacagcatgatcagaaagtatgtgagagggagatgcagcgaatcactctgcccttgtctgccttcaccaaccccacctgtgagattgtggatgagaagactgtcgtggtccacaccagccagactccagttgaccctcaggagggcaccaccccccttatgggccaggccgggactcctggggcctgagcccccccagtgggcaggagcccatgcagacactggtgcaggacagcccaccctcctacagctaggangaactaccactttgtgttctggttaaaaccctaccactccccccgctttttttggcgaatcctantaanantgacanaancaggtggccctgtgggctgaagggtaaggctgggntagggtcctaacantgctccttgtccatcccttggnancaaatttttttnttntggatggaaaanagtggncaacntccccacantgaatgcttgcttgctaaggggcnttnccaaaanatttgccttgcnccccntggaaactnaanccangggataaaacggggaacntccccccaggcttcctntgtggttttaanaaaaanggncctcaattttccnnttgggggnnttnantnggcaaaaacc

SEQ ID NO: 25 - DNA, 1075 bp, Homo Sapiens
  misc_feature (1)..(1): n is a, c, g, or t
  misc_feature (943)..(943): n is a, c, g, or t
  misc_feature (948)..(948): n is a, c, g, or t
  misc_feature (964)..(964): n is a, c, g, or t
  misc_feature (970)..(970): n is a, c, g, or t
  misc_feature (973)..(973): n is a, c, g, or t
  misc_feature (998)..(998): n is a, c, g, or t
  misc_feature (1005)..(1005): n is a, c, g, or t
  misc_feature (1039)..(1040): n is a, c, g, or t
  misc_feature (1056)..(1057): n is a, c, g, or t
  misc_feature (1060)..(1061): n is a, c, g, or t
  misc_feature (1070)..(1070): n is a, c, g, or t
  misc_feature (1072)..(1072): n is a, c, g, or t
naatagagaaattactatgagaggatcgcatcaccatcaccatcacggatcctatttaggtgacactatagaatcgtcgacccacgcgtccgatagcttaccgcaaggatcagactgttgctggacacgacgtctgtgtggagccaggaggaacacatgtggtgtctgtatggctgctctctacctaggacaccagctgccacttcttttgcctcatgaagaactcttgggccagccaaactgggaacctaggtgtctgggtcttgtgacaaccaaagcactttgacactaccccctgccgagagaagaggagtggatgagcctgcgggtttgcctcaagaaacttcatgagggtctcttactaactccattacactctctctcctggagcctcatctccatgtcaagcaggagggtaaagaagggaactaagagcaggtctttcaagccacacccccacctgcggatggatgggtttctctgtaggccatgcaggcctttgtcgcagcaaaccttcccagcagcccttgagccaagtaaaaccagcacaaccagccaccagtggttggtgaggcagtgcccacaaggctcatgttgtatgcctttgataaggccatcttggctttgagtagcagtgttcctcgtcacccatttccccctcaggattacaacacctgctatcaaatcatctaagctgaaaacatgagatgcgcttggaaaggcctagtcagaagccatttcctcttatcatttccctctcctatgcaccagtaaggcccgtccagagccccagcagggagtgggccctgagtccacactgtccctgagtgatccaggaggctgcccacatcccccacatgtgcactgtggttccagtgtagctgctgtgagcccactgccactgcctcaaaagggagccactgtgaacctctcgagtggctcnaaaancagtggcttttttganaatggnccnatacttctggcccggctggatgaanggaatgnccaaccctttggcctctccccctccttccatttnnttctctctcttggccnnatnnctcttttcnanttc

SEQ ID NO: 26 - DNA, 1295 bp, Homo Sapiens
  misc_feature (887)..(887): n is a, c, g, or t
  misc_feature (944)..(944): n is a, c, g, or t
  misc_feature (979)..(979): n is a, c, g, or t
  misc_feature (996)..(996): n is a, c, g, or t
  misc_feature (1004)..(1004): n is a, c, g, or t
  misc_feature (1018)..(1018): n is a, c, g, or t
  misc_feature (1033)..(1033): n is a, c, g, or t
  misc_feature (1036)..(1036): n is a, c, g, or t
  misc_feature (1040)..(1040): n is a, c, g, or t
  misc_feature (1043)..(1043): n is a, c, g, or t
  misc_feature (1045)..(1045): n is a, c, g, or t
  misc_feature (1048)..(1048): n is a, c, g, or t
  misc_feature (1052)..(1052): n is a, c, g, or t
  misc_feature (1055)..(1055): n is a, c, g, or t
  misc_feature (1060)..(1060): n is a, c, g, or t
  misc_feature (1082)..(1082): n is a, c, g, or t
  misc_feature (1084)..(1084): n is a, c, g, or t
  misc_feature (1090)..(1090): n is a, c, g, or t
  misc_feature (1094)..(1094): n is a, c, g, or t
  misc_feature (1096)..(1096): n is a, c, g, or t
  misc_feature (1105)..(1105): n is a, c, g, or t
  misc_feature (1133)..(1133): n is a, c, g, or t
  misc_feature (1143)..(1143): n is a, c, g, or t
  misc_feature (1150)..(1150): n is a, c, g, or t
  misc_feature (1160)..(1161): n is a, c, g, or t
  misc_feature (1179)..(1179): n is a, c, g, or t
  misc_feature (1181)..(1181): n is a, c, g, or t
  misc_feature (1184)..(1184): n is a, c, g, or t
  misc_feature (1198)..(1198): n is a, c, g, or t
  misc_feature (1207)..(1207): n is a, c, g, or t
  misc_feature (1210)..(1211): n is a, c, g, or t
  misc_feature (1219)..(1219): n is a, c, g, or t
  misc_feature (1225)..(1225): n is a, c, g, or t
  misc_feature (1230)..(1231): n is a, c, g, or t
  misc_feature (1237)..(1237): n is a, c, g, or t
  misc_feature (1242)..(1242): n is a, c, g, or t
  misc_feature (1261)..(1261): n is a, c, g, or t
  misc_feature (1273)..(1273): n is a, c, g, or t
  misc_feature (1278)..(1278): n is a, c, g, or t
  misc_feature (1282)..(1282): n is a, c, g, or t
tagagaaattactatgagaggatcgcatcaccatcaccatcacggatcctatttaggtgacactatagaatcgtcgacccacgcgtccgcccacgcgtccgcgctgacgggcacgctgactggaggctggcggacaggcgacagcgacctgcggcaggaccagaggagcgagagcagcaagaaccacacccagcagcaatgtcagcggaagtggaaacctcagagggggtagacgagtcagaaaaaaagaactctggggccctagaaaaggagaaccaaatgagaatggctgacctctcggagctcctgaaggaagggaccaaggaagcacacgaccgggcagaaaacacccagtttgtcaaggacttcttgaaaggcaacattaagaaggagctgtttaagctggccaccacggcactttacttcacatactcagccctcgaggaggaaatggagcgcaacaaggaccatccagcctttgcccctttgtacttccccatggagctgcaccggaaggaggcgctgaccaaggacatggagtatttctttggtgaaaactgggaggagcaggtgcagtgccccaaggctgcccagaagtacgtggagcggatccactacatagggcagaacgagccggagctactggtggcccatgcatacacccgctacatgggggatctctcggggggccaggtgctgaagaaggtggcccagcgagcactgaaactccccagcacaggggaagggacccagttctacctgtttgagaatgtggacaatgcccagcagttcaagcagctctaccgggccaggatgaacgccctggacctgaacatgaagaccaaagagaggatcgtggaggaggccaacaaggcttttgagtatancatgcagatattcaatgaactggaccaggccggctccacactggccaaaaagacctnggaggatgggttccctgtacacgatgggaaagganacatgcgtaaatgcccntttctacnctgctgaacaaaanaaaggtgccctgganggnacanctntnccnttcnaanagctntggcttgtgctgaagaaacccnancctccnattncntcctggccnctggggtggccctaactgctggactctnggcctggtantactggnaacccccttnntgcccaccggtaccctcntnccnaatgaaccttggcntaccctttnccnnccctgaanaaatanccccnngggganttttnaaaagggggggttttaaanggcccctaaaanccaantttnaaaaaaaaaaaag

SEQ ID NO: 27 - DNA, 1328 bp, Homo Sapiens
  misc_feature (895)..(895): n is a, c, g, or t
  misc_feature (983)..(983): n is a, c, g, or t
  misc_feature (988)..(988): n is a, c, g, or t
  misc_feature (993)..(993): n is a, c, g, or t
  misc_feature (999)..(999): n is a, c, g, or t
  misc_feature (1008)..(1008): n is a, c, g, or t
  misc_feature (1061)..(1061): n is a, c, g, or t
  misc_feature (1069)..(1069): n is a, c, g, or t
  misc_feature (1071)..(1071): n is a, c, g, or t
  misc_feature (1078)..(1078): n is a, c, g, or t
  misc_feature (1089)..(1089): n is a, c, g, or t
  misc_feature (1119)..(1119): n is a, c, g, or t
  misc_feature (1123)..(1124): n is a, c, g, or t
  misc_feature (1128)..(1128): n is a, c, g, or t
  misc_feature (1136)..(1137): n is a, c, g, or t
  misc_feature (1142)..(1142): n is a, c, g, or t
  misc_feature (1151)..(1151): n is a, c, g, or t
  misc_feature (1160)..(1160): n is a, c, g, or t
  misc_feature (1184)..(1184): n is a, c, g, or t
  misc_feature (1191)..(1191): n is a, c, g, or t
  misc_feature (1197)..(1197): n is a, c, g, or t
  misc_feature (1209)..(1210): n is a, c, g, or t
  misc_feature (1220)..(1221): n is a, c, g, or t
  misc_feature (1226)..(1226): n is a, c, g, or t
  misc_feature (1240)..(1240): n is a, c, g, or t
  misc_feature (1245)..(1245): n is a, c, g, or t
  misc_feature (1248)..(1249): n is a, c, g, or t
  misc_feature (1259)..(1259): n is a, c, g, or t
  misc_feature (1270)..(1273): n is a, c, g, or t
  misc_feature (1275)..(1277): n is a, c, g, or t
  misc_feature (1288)..(1288): n is a, c, g, or t
  misc_feature (1306)..(1306): n is a, c, g, or t
  misc_feature (1312)..(1312): n is a, c, g, or t
  misc_feature (1322)..(1322): n is a, c, g, or t
  misc_feature (1328)..(1328): n is a, c, g, or t
tagagaaattactatgagaggatcgcatcaccatcaccatcacggatcctatttaggtgacactatagaatcgtcgacccacgcgtccgcggaagaaggcgctgctgaagctggagaagctggacacagacctgaagaactacaagggcaactccatcaaagagagcatccggcgcggccacgacgacctgggcgaccactacctggactgtggggacctcagcaacgccctcaagtgctattcccgggcccgggactactgcaccagcgccaaacacgtcatcaacatgtgcctcaatgtcatcaaggtcagcgtctacttgcagaattggtctcatgtgctcagctacgtcagcaaggctgagtccaccccagagattgccgagcagcgaggagagcgtgacagccagacccaggccatcctcaccaagctcaagtgtgccgcaggcttggcagagctggccgccaggaagtacaagcaggctgccaagtgcctcctgctggcttcctttgatcactgtgacttccctgagctgctgtcccccagcaacgtggccatctacggtggcctgtgcgccttggctacctttgaccggcaggagctgcagcgcaatgtcatctccagcagctccttcaagttgttcttggagctggagccacaggtccgagacatcatcttcaaattctacgagtccaagtacgcctcatgtctcaagatgctggacgagatgaaggacaacctgctcctggacatgtatctggccccccatgtcaggaccctgtacacccagattcgcaaccgtgccctcatccagtatttcagcccctacgtgtcagccgacatgcataggatggcggcagccttcaataccacggtggccgcccctggaggacnagctgacgcagctaatcctggagggggctgatcagtgcccgtgtggactcacacagcaagatcctatacgccccgggacgtggatcancgcancaccncctttnaaaaatctnttgttgatgggcaaggaatttccagcgccccccccaaggccatgaatgctgcnggcaactntntctcccncaaccaaaatnccatgttcaagtccccccccccaaaaaaangganncccngggggganntttanttccagccnaaaacccantcccggaaaaaaccccaaaatgtngaggggngaaacnttggccctccannaaaatttggnnccccnttccccccttccanggaanctnngaaacttccngggggttttannnntnnntggggcccaantaagggggcctgggcccntggggncccccccccngggggn

SEQ ID NO: 28 - DNA, 442 bp, Homo Sapiens
atagagaaaattactatgagaggatcgcatcaccatcaccatcacggatcctatttaggtgacactatagaatcgtcgacccacgcgtccggcgtgtttcactgctgcaccttctgctccagcgggggccagaaaaccgctcgctgcgcctgtggaggcaccatgccaggtgggtacctaggctgtggccatggacacaaaggccacccaggtcatccccactggtcatgctgtggaaaatttaatgagaaatctgaatgcacatggacaggtgggcagagcgcaccgaggagtctacttaggactgtggctctctgatgggtttgtgctcagccttttaaagctgcaggcagcaccacttgagatttccagaggacccagaccttcgttcattctaaagagactgatagaattaaaaacaaagtgccttatcttgcactgg

SEQ ID NO: 29 - DNA, 1035 bp, Homo Sapiens
  misc_feature (911)..(911): n is a, c, g, or t
  misc_feature (916)..(916): n is a, c, g, or t
  misc_feature (923)..(923): n is a, c, g, or t
  misc_feature (944)..(944): n is a, c, g, or t
  misc_feature (947)..(947): n is a, c, g, or t
  misc_feature (956)..(956): n is a, c, g, or t
  misc_feature (963)..(963): n is a, c, g, or t
  misc_feature (998)..(999): n is a, c, g, or t
  misc_feature (1001)..(1001): n is a, c, g, or t
  misc_feature (1003)..(1003): n is a, c, g, or t
  misc_feature (1009)..(1009): n is a, c, g, or t
  misc_feature (1014)..(1014): n is a, c, g, or t
  misc_feature (1020)..(1020): n is a, c, g, or t
  misc_feature (1026)..(1027): n is a, c, g, or t
  misc_feature (1029)..(1029): n is a, c, g, or t
  misc_feature (1033)..(1033): n is a, c, g, or t
tagagaaattactatgagaggatcgcatcaccatcaccatcacggatcctatttaggtgacactatagaatcgtcgacccacgcgtccggatcccgccggaagcgccaggacaatggggacccgggacgacgagtacgactacctattcaaagtggtgctcatcggggactcaggcgtgggcaagagcaacctgctgtcgcgcttcacccgcaacgagttcaacctggagagcaagagcaccatcggcgtggagttcgccacccgcagcatccaggtggacggcaagaccatcaaggcgcagatctgggacaccgctggccaggagcgctaccgcgccatcacctccgcgtactaccgtggtgcagtgggcgccctgctggtgtacgacatcgccaagcacctgacctatgagaacgtggagcgctggctgaaggagctgcgggaccacgcagacagcaacatcgtcatcatgctggtgggcaacaagagtgacctgcgccacctgcgggctgtgcccactgacgaggcccgcgccttcgcagaaaagaacaacttgtccttcatcgagacctcagccttggattccactaacgtagaggaagcattcaagaacatcctcacagagatctaccgcatcgtgtcacagaaacagatcgcagaccgcgctgcccacgacgagtccccggggaacaacgtggtggacatcagcgtgccgcccaccacggacggacagaagcccaacaagctgcagtgctgccagaacctgtgacccctgcgcctccacccagcgtgcgtgcacgtcctccgcccgcccccgccacggtatcctctggcccctccctgctgtccctctgtggccggctcgttccagccctcccagtgagctctgcacggccgggccggggcccangaagnacaggancccagtgctaccccgtcctgnccngggaaaaanctaaaanccccggtttgctgcacccatgaaactcgggtcccnnancntcttgncgggntggggnaggccnnanaatnaa

SEQ ID NO: 30 - DNA, 544 bp, Homo Sapiens
tagagaaattaactatgagaggatcgcatcaccatcaccatcacggatcctatttaggtgacactatagaatcgtcgacccacgcgtccggggtgaggccctcacttcatccggcgactagcaccgcgtccggcagcgccagccctacactcgcccgcgccatggcctctgtctccgagctcgcctgcatctactcggccctcattctgcacgacgatgaggtgacagtcacggaggataagatcaatgccctcattaaagcagccggtgtaaatgttgagcctttttggcctggcttgtttgcaaaggccctggccaacgtcaacattgggagcctcatctgcaatgtaggggccggtggacctgctccagcagctggtgctgcaccagcaggaggtcctgccccctccactgctgctgctccagctgaggagaagaaagtggaagcaaagaaagaagaatccgaggagtctgatgatgacatgggctttggtctttttgactaaacctcttttataacatgttcaataaaaagctgaacttt

SEQ ID NO: 31 - DNA, 1062 bp, Homo Sapiens
  misc_feature (1)..(1): n is a, c, g, or t
  misc_feature (4)..(4): n is a, c, g, or t
  misc_feature (742)..(742): n is a, c, g, or t
  misc_feature (765)..(765): n is a, c, g, or t
  misc_feature (817)..(817): n is a, c, g, or t
  misc_feature (845)..(845): n is a, c, g, or t
  misc_feature (854)..(854): n is a, c, g, or t
  misc_feature (860)..(860): n is a, c, g, or t
  misc_feature (866)..(866): n is a, c, g, or t
  misc_feature (868)..(868): n is a, c, g, or t
  misc_feature (871)..(871): n is a, c, g, or t
  misc_feature (878)..(879): n is a, c, g, or t
  misc_feature (903)..(903): n is a, c, g, or t
  misc_feature (915)..(915): n is a, c, g, or t
  misc_feature (963)..(963): n is a, c, g, or t
  misc_feature (969)..(969): n is a, c, g, or t
  misc_feature (979)..(979): n is a, c, g, or t
  misc_feature (983)..(983): n is a, c, g, or t
  misc_feature (996)..(996): n is a, c, g, or t
  misc_feature (1006)..(1006): n is a, c, g, or t
  misc_feature (1008)..(1008): n is a, c, g, or t
  misc_feature (1011)..(1011): n is a, c, g, or t
  misc_feature (1014)..(1016): n is a, c, g, or t
  misc_feature (1018)..(1018): n is a, c, g, or t
  misc_feature (1044)..(1044): n is a, c, g, or t
  misc_feature (1051)..(1051): n is a, c, g, or t
  misc_feature (1056)..(1056): n is a, c, g, or t
naantagagagattaactatgagaggatcgcatcaccatcaccatcacggatcctatttaggtgacactatagaatcgtcgacccacgcgtccgccgcgctcgcagctcgcaggcgccgcgtagccgtcgccaccgccgccagcccgtgcgccctcggcgcgtacccgccgcgctcccatccccgccgccggccaggggcgcgctcggccgccccggacagtgtcccgctgcggctccgcggcgatggccaccaagatcgacaaagaggcttgccgggcggcgtacaacctggtgcgcgacgacggctcggccgtcatctgggtgacttttaaatatgacggctccaccatcgtccccggcgagcagggagcggagtaccagcacttcatccagcagtgcacagatgacgtccggttgtttgccttcgtgcgcttcaccaccggggatgccatgagcaagaggtccaagtttgccctcatcacgtggatcggtgagaacgtcagcgggctgcagcgcgccaaaaccgggacggacaagaccctggtgaaggaggtcgtacagaatttcgctaaggagtttgtgatcagtgatcggaaggagctggaggaagatttcatcaagagcgagctgaagaaggcggggggagccaattacgacgcccagacggagtaaccccagcccccgccacaccaccccttgccaaagtcatctgcctgctccccgggggagaggaccgccggnctcagctactagcccaccagccnaccaggaagaagagaagccatgagaggcagcgcccgccaccctgttgtccanagccccccacctttcccgctttccttanaaaccttgnccgtgntcctantntcnatgaacnntcatgggaacctcttttctttgancttcttttttcnttttcctccccctcttttttttgttcctaaaaaaaaaatcaatttttnaatggnaagggtcctngccntgcccattcaaantccaaagggncnttnctnnnantgaccctttttctttgggattttttntttcaanccaanaaggtt

SEQ ID NO: 32 - DNA, 1156 bp, Homo Sapiens
  misc_feature (1)..(1): n is a, c, g, or t
  misc_feature (3)..(3): n is a, c, g, or t
  misc_feature (762)..(762): n is a, c, g, or t
  misc_feature (811)..(811): n is a, c, g, or t
  misc_feature (897)..(897): n is a, c, g, or t
  misc_feature (908)..(908): n is a, c, g, or t
  misc_feature (957)..(957): n is a, c, g, or t
  misc_feature (973)..(973): n is a, c, g, or t
  misc_feature (976)..(976): n is a, c, g, or t
  misc_feature (980)..(980): n is a, c, g, or t
  misc_feature (998)..(999): n is a, c, g, or t
  misc_feature (1002)..(1002): n is a, c, g, or t
  misc_feature (1007)..(1007): n is a, c, g, or t
  misc_feature (1013)..(1013): n is a, c, g, or t
  misc_feature (1017)..(1017): n is a, c, g, or t
  misc_feature (1031)..(1031): n is a, c, g, or t
  misc_feature (1036)..(1036): n is a, c, g, or t
  misc_feature (1044)..(1045): n is a, c, g, or t
  misc_feature (1052)..(1053): n is a, c, g, or t
  misc_feature (1059)..(1059): n is a, c, g, or t
  misc_feature (1067)..(1067): n is a, c, g, or t
  misc_feature (1070)..(1070): n is a, c, g, or t
  misc_feature (1072)..(1072): n is a, c, g, or t
  misc_feature (1075)..(1075): n is a, c, g, or t
  misc_feature (1085)..(1085): n is a, c, g, or t
  misc_feature (1093)..(1093): n is a, c, g, or t
  misc_feature (1111)..(1111): n is a, c, g, or t
  misc_feature (1122)..(1123): n is a, c, g, or t
  misc_feature (1134)..(1134): n is a, c, g, or t
  misc_feature (1140)..(1140): n is a, c, g, or t
  misc_feature (1148)..(1148): n is a, c, g, or t
  misc_feature (1150)..(1150): n is a, c, g, or t
ntntagagaaattactatgagaggatcgcatcaccatcaccatcacggatcctatttaggtgacactatagaatcgtcgacccacgcgtccgcctgcctactgcagcgtaggcctcgcctcaacggcaggagagcaggcggctgcggttgctgcagccttcagtctccacccggactacgccatgttggggtttgtgggtcgggtggccgctgctccggcctccggggccttgcggagactcaccccttcagcgtcgctgcccccagctcagctcttactgcgggccgctccgacggcggtccatcctgtcagggactatgcggcgcaaacatctccttcgccaaaagcaggcgccgccaccgggcgcatcgtggcggtcattggcgcagtggtggacgtccagtttgatgagggactaccaccaattctaaatgccctggaagtgcaaggcagggagaccagactggttttggaggtggcccagcatttgggtgagagcacagtaaggactattgctatggatggtacagaaggcttggttagaggccagaaagtactggattctggtgcaccaatcaaaattcctgttggtcctgagactttgggcagaatcatgaatgtcattggagaacctattgatgaaagaggtcccatcaaaaccaaacaatttgctcccattcatgctgaggctccaaagttcatggaaatgagtgttgagcaggaaattctggtgactggtatcaaggttgtcgatctgctanctccctatgccaagggtggcaaaattggtcttttttggtggtgctgganttggcaagactgtactgatcatggagttaatcaacaatgtcgcccaaagcccatggtggttactctgtgtttgctggtggttggtnaaaaggacccntgaaaggcaatgaattaataccatgaaaatgatttgaatctggtgttanccaacttaaaagaatnccncctnctaaagtaaccgcttggnntantggtncaaatnaatnaacccaccctggtnccccntgccccgnntaacctnncaactnggcctgantgngnctnaataccttcnaaaaaacnaagaaagtcaaaaaaggnactgccatttnnttgaaaaaatnctttcncttccccncnatgggt

SEQ ID NO: 33 - DNA, 1165 bp, Homo Sapiens
  misc_feature (86)..(86): n is a, c, g, or t
  misc_feature (750)..(750): n is a, c, g, or t
  misc_feature (819)..(819): n is a, c, g, or t
  misc_feature (849)..(849): n is a, c, g, or t
  misc_feature (855)..(855): n is a, c, g, or t
  misc_feature (871)..(871): n is a, c, g, or t
  misc_feature (901)..(901): n is a, c, g, or t
  misc_feature (903)..(903): n is a, c, g, or t
  misc_feature (930)..(930): n is a, c, g, or t
  misc_feature (940)..(940): n is a, c, g, or t
  misc_feature (945)..(945): n is a, c, g, or t
  misc_feature (953)..(953): n is a, c, g, or t
  misc_feature (957)..(957): n is a, c, g, or t
  misc_feature (970)..(970): n is a, c, g, or t
  misc_feature (979)..(979): n is a, c, g, or t
  misc_feature (989)..(989): n is a, c, g, or t
  misc_feature (1001)..(1001): n is a, c, g, or t
  misc_feature (1003)..(1003): n is a, c, g, or t
  misc_feature (1015)..(1015): n is a, c, g, or t
  misc_feature (1029)..(1029): n is a, c, g, or t
  misc_feature (1031)..(1031): n is a, c, g, or t
  misc_feature (1057)..(1057): n is a, c, g, or t
  misc_feature (1065)..(1065): n is a, c, g, or t
  misc_feature (1072)..(1072): n is a, c, g, or t
  misc_feature (1085)..(1085): n is a, c, g, or t
  misc_feature (1125)..(1127): n is a, c, g, or t
  misc_feature (1131)..(1131): n is a, c, g, or t
  misc_feature (1134)..(1134): n is a, c, g, or t
  misc_feature (1136)..(1136): n is a, c, g, or t
  misc_feature (1142)..(1142): n is a, c, g, or t
  misc_feature (1145)..(1145): n is a, c, g, or t
  misc_feature (1147)..(1147): n is a, c, g, or t
  misc_feature (1149)..(1149): n is a, c, g, or t
  misc_feature (1160)..(1160): n is a, c, g, or t
  misc_feature (1165)..(1165): n is a, c, g, or t
tagagaaattactatgagaggatcgcatcaccatcaccatcacggatcctatttaggtgacactatagaatcgtcgacccacgcgntccggccatggccgcgccggccccgggcctcatctcggtgttctcgagttcccaggagctgggtgcggcgctagcgcagctggtggcccagcgcgcagcatgctgcctggcaggggcccgcgcccgtttcgcgctcggcttgtcgggcgggagcctcgtctcgatgctagcccgcgagctacccgccgccgtcgcccctgccgggccagctagcttagcgcgctggacgctgggcttctgcgacgagcgcctcgtgcccttcgatcacgccgagagcacgtacggcctctaccggacgcatcttctctccagactgccgatcccagaaagccaggtgatcaccattaaccccgagctgcctgtggaggaggcggctgaggactacgccaagaagctgagacaggcattccaaggggactccatcccggttttcgacctgctgatcctgggggtgggccccgatggtcacacctgctcactcttcccagaccaccccctcctacaggagcgggagaagattgtggctcccatcagtgactccccgaagccaccgccacagcgtgtgaccctcacgctacctgtcctgaatgcagcacgaactgtcatctttgtggcaactggagaaggcaaggcagctgttctgaagcgcattttggaggaccangaggaaaacccgctgcccgccgccctggtccagccccacaccgggaaaactgtgctggttcttggaacnaagcggcccgctcccttatagtgagtcgtnattaancttaaattagcctgancttggactcctgttgataaaatccagtaantnaccctcaaaaactccatctggaatttntttaaaaaangctcnggttgccncccngggcttttttttnttggtgaanaaattccaancttaacctttgncnaaaatttttcanggaacctaaagaantntaaaattggaaaaaaaaaaatcactngaaaatanccaccgnttaaaaaatcccnaatggaatcctaaaaaaaaattttttaaaggcattttcannncaanttntncaattntancntnaaaaccaaaancgttn

SEQ ID NO: 34 - DNA, 1181 bp, Homo Sapiens
  misc_feature (922)..(922): n is a, c, g, or t
  misc_feature (940)..(940): n is a, c, g, or t
  misc_feature (966)..(966): n is a, c, g, or t
  misc_feature (972)..(972): n is a, c, g, or t
  misc_feature (976)..(976): n is a, c, g, or t
  misc_feature (988)..(988): n is a, c, g, or t
  misc_feature (990)..(990): n is a, c, g, or t
  misc_feature (1012)..(1012): n is a, c, g, or t
  misc_feature (1031)..(1031): n is a, c, g, or t
  misc_feature (1052)..(1052): n is a, c, g, or t
  misc_feature (1055)..(1055): n is a, c, g, or t
  misc_feature (1065)..(1065): n is a, c, g, or t
  misc_feature (1069)..(1069): n is a, c, g, or t
  misc_feature (1075)..(1075): n is a, c, g, or t
  misc_feature (1078)..(1078): n is a, c, g, or t
  misc_feature (1084)..(1084): n is a, c, g, or t
  misc_feature (1103)..(1103): n is a, c, g, or t
  misc_feature (1106)..(1106): n is a, c, g, or t
  misc_feature (1117)..(1117): n is a, c, g, or t
  misc_feature (1124)..(1124): n is a, c, g, or t
  misc_feature (1127)..(1127): n is a, c, g, or t
  misc_feature (1129)..(1129): n is a, c, g, or t
  misc_feature (1134)..(1134): n is a, c, g, or t
  misc_feature (1139)..(1139): n is a, c, g, or t
  misc_feature (1142)..(1142): n is a, c, g, or t
  misc_feature (1144)..(1144): n is a, c, g, or t
  misc_feature (1158)..(1158): n is a, c, g, or t
  misc_feature (1160)..(1160): n is a, c, g, or t
  misc_feature (1162)..(1162): n is a, c, g, or t
  misc_feature (1169)..(1169): n is a, c, g, or t
  misc_feature (1172)..(1172): n is a, c, g, or t
  misc_feature (1181)..(1181): n is a, c, g, or t
agagaaattactatgagaggatcgcatcaccatcaccatcacggatcctatttaggtgacactatagaatcgtcgacccacgcgtccgcggacgcgtggggtcgctgccgctgccgctgccactgccactgccacctcgcggatcaggagccagcgttgttcgcccgacgcctcgctgccggtgggaggaagcgagagggaagccgcttgcgggtttgtcgccgctgctcgcccaccgcctggaagagccgagccccggcccagtcggtcgcttgccaccgctcgtagccgttacccgcgggccgccacagccgccggccgggagaggcgcgcgccatggcttctggagccgattcaaaaggtgatgacctatcaacagccattctcaaacagaagaaccgtcccaatcggttaattgttgatgaagccatcaatgaggacaacagtgtggtgtccttgtcccagcccaagatggatgaattgcagttgttccgaggtgacacagtgttgctgaaaggaaagaagagacgagaagctgtttgcatcgtcctttctgatgatacttgttctgatgagaagattcggatgaatagagttgttcggaataaccttcgtgtacgcctaggggatgtcatcagcatccagccatgccctgatgtgaagtacggcaaacgtatccatgtgctgcccattgatgacacagtggaaggcattactggtaatctcttcgaggtataccttaagccgtacttcctggaagcgtatcgacccatccggaaaggagacatttttcttgtccgtggtgggatgcgtgctgtggagttcaaagtggtggaaacagatcctagcccttattgcattgttgctccagacacagtgatccactgcgaaggggagcctatcaaacgagaggatgaggaanagtccttgaatgaagtanggtatgatgacattggtggctgcagnaaccanctanctcaaataaagnanatgggggaactgcccctgaaanatcctgccctctttaaggnattggggtgaaacctcctaangantcctgctttnacgnacctcntgnaaaagnaaaaacctgattgctccanctnaacaaatgaantgaaccntcntnttttnataanggncngaaatatgaacaantngntgggganttnaaaaaaacn

SEQ ID NO: 35 - DNA, 977 bp, Homo Sapiens
  misc_feature (837)..(837): n is a, c, g, or t
  misc_feature (849)..(849): n is a, c, g, or t
  misc_feature (854)..(854): n is a, c, g, or t
  misc_feature (887)..(892): n is a, c, g, or t
  misc_feature (894)..(905): n is a, c, g, or t
  misc_feature (909)..(909): n is a, c, g, or t
  misc_feature (912)..(912): n is a, c, g, or t
  misc_feature (929)..(929): n is a, c, g, or t
  misc_feature (936)..(936): n is a, c, g, or t
  misc_feature (944)..(944): n is a, c, g, or t
  misc_feature (956)..(957): n is a, c, g, or t
  misc_feature (960)..(960): n is a, c, g, or t
  misc_feature (966)..(966): n is a, c, g, or t
  misc_feature (970)..(970): n is a, c, g, or t
aatagagaaattactatgagaggatcgcatcaccatcaccatcacggatcctatttaggtgacactatagaatcgtcgacccacgcgtccgcccacgcgtccgcgagagcccatcggagaccccaggcccccgcccagcaggacctgcaggggacgagccagccgagagcccatcggagaccccaggcccccgcccggcaggacctgcaggggacgagccagccgagagcccatcggagaccccaggccccagcccggcaggacctacaagggatgagccagccgagagcccatcggagaccccaggcccccgcccggcaggacctgcaggggacgagccagccgagagcccatcggagaccccaggcccccgcccggcaggacctgcaggggacgagccagccgagagcccatcggagaccccaggccccagcccggcaggacctacaagggatgagccagccaaggcgggggaggcagcagagttgcaggacgcagaggtggagtcttctgccaagtctgggaagccttaaggaaaggagtgcccgtcggcgtcttggtcctcctgtccctgctgcaggggctggggcctccggagctgctgcgggctcccctcaggctctgcttcgtgacccgtgacccatgacccacagtgctggcctcctgtggggccactatagcagccaccagaagccgcgaggccctcagggaagcccaaggcctgcagaagcctcctggcctggctgtgtcttccccacccagctctcccctgcgccccctgtctttgtaattgacccttctggagtgggggggcggcgggcaggctgcttttcttantctgataccaancaggnccttttctgataaattcttttactttgaaaaannnnnntnnnnnnnnnnnnaaanggngggccgctcccttttantgagtcntatttaancctttattttannttnaacttnggantccttgt

SEQ ID NO: 36 - DNA, 1089 bp, Homo Sapiens
  misc_feature (1)..(1): n is a, c, g, or t
  misc_feature (835)..(835): n is a, c, g, or t
  misc_feature (895)..(895): n is a, c, g, or t
  misc_feature (911)..(911): n is a, c, g, or t
  misc_feature (915)..(915): n is a, c, g, or t
  misc_feature (971)..(971): n is a, c, g, or t
  misc_feature (983)..(983): n is a, c, g, or t
  misc_feature (985)..(985): n is a, c, g, or t
  misc_feature (987)..(987): n is a, c, g, or t
  misc_feature (995)..(995): n is a, c, g, or t
  misc_feature (998)..(998): n is a, c, g, or t
  misc_feature (1014)..(1014): n is a, c, g, or t
  misc_feature (1024)..(1024): n is a, c, g, or t
  misc_feature (1046)..(1046): n is a, c, g, or t
  misc_feature (1056)..(1056): n is a, c, g, or t
  misc_feature (1061)..(1061): n is a, c, g, or t
  misc_feature (1063)..(1063): n is a, c, g, or t
  misc_feature (1068)..(1069): n is a, c, g, or t
  misc_feature (1072)..(1073): n is a, c, g, or t
  misc_feature (1086)..(1086): n is a, c, g, or t
  misc_feature (1088)..(1089): n is a, c, g, or t
nttagagaaattactatgagaggatcgcatcaccatcaccatcacggatcctatttaggtgacactatagaatcgtcgacccacgcgtccgcccacgcgtccgcccacgcgtccgctcctagaaagacagggagttggtgccctgcacagatgacaaactgccccagacagcagacagacaaacaaactgccccggacagcagacagacaaacagacacattgccctggacagcagagagacaaacagacacactgccccggacagcagacagacagacacgttgccccggacagcagacagaaaaactgccccggacagcagacagacagacaaactgccccagacagcagacagacaaactgccccggaaagcagacagcaaactgccccagacagcagacagacagacacacttccccagacagcagatagacagacaccctgccccagacagcagacaagctgccctggacagcctgctcaccttgcctgccacagtgcatgccccacagggagaagccttccttctcacccagggagtccagccattttcacctcccctggtccatgctcaggaagtctggtcaccctggcaaactgcacctgacattgaggtcccttttcaccaaagatgcacaaggtgtccatgccgagccgacatcattcaggccaagggcagaggatgtaatgaggggtggagtgaggatgtggagagagagcagagagcgcctcctattctaccgcggctgcctctgcccccacagcacccacagatccctggcccttccaggagtaagtcctgggcaggcagagctggggtttggcctgatccnacctgccttgctcttggaaaaggacatcaggtgtggggcaaagcatccttgaagccccanacaacacaggcatggnctgngtgcccttcccagcatctggtgcgatggcctcaaggcctcttcagtcccctgctgnaccatgccactnanancccctgantgngccccttggaattttntgcccccccnaagccccaacaggaaaaagggnaagggtgggnaactnanccttnntcnntgcccctgggtgncnn

SEQ ID NO: 37 - DNA, 276 bp, Homo Sapiens
  misc_feature (1)..(1): n is a, c, g, or t
  misc_feature (3)..(4): n is a, c, g, or t
  misc_feature (7)..(7): n is a, c, g, or t
  misc_feature (12)..(12): n is a, c, g, or t
  misc_feature (14)..(15): n is a, c, g, or t
  misc_feature (38)..(38): n is a, c, g, or t
  misc_feature (54)..(55): n is a, c, g, or t
  misc_feature (59)..(59): n is a, c, g, or t
  misc_feature (62)..(63): n is a, c, g, or t
  misc_feature (77)..(77): n is a, c, g, or t
  misc_feature (83)..(83): n is a, c, g, or t
  misc_feature (106)..(106): n is a, c, g, or t
  misc_feature (115)..(115): n is a, c, g, or t
  misc_feature (135)..(135): n is a, c, g, or t
  misc_feature (152)..(152): n is a, c, g, or t
  misc_feature (156)..(156): n is a, c, g, or t
  misc_feature (163)..(163): n is a, c, g, or t
  misc_feature (196)..(196): n is a, c, g, or t
  misc_feature (203)..(203): n is a, c, g, or t
  misc_feature (205)..(205): n is a, c, g, or t
  misc_feature (218)..(218): n is a, c, g, or t
  misc_feature (223)..(223): n is a, c, g, or t
  misc_feature (232)..(232): n is a, c, g, or t
  misc_feature (237)..(237): n is a, c, g, or t
  misc_feature (241)..(241): n is a, c, g, or t
  misc_feature (248)..(248): n is a, c, g, or t
  misc_feature (254)..(255): n is a, c, g, or t
  misc_feature (257)..(257): n is a, c, g, or t
  misc_feature (261)..(261): n is a, c, g, or t
  misc_feature (264)..(265): n is a, c, g, or t
ncnncanaatangnngagatattactatgagaggatcncctcaccctcaccatnncggnatnntatttgggtgacanttatanaatcgtccacccacgcgctccgngcctcgcgngggcgtcgttcccgggcggnagctggagacgcgccancggntgcgtgngaccaagagcgggcgccgggagctccgcagagngcggccngncgaggcgggagcncgggntgctggccngatcncgtncaggggncgccgnngngccnctnnccccctgacgc

SEQ ID NO: 38 - DNA, 1112 bp, Homo Sapiens
  misc_feature (1)..(2): n is a, c, g, or t
  misc_feature (783)..(783): n is a, c, g, or t
  misc_feature (812)..(812): n is a, c, g, or t
  misc_feature (845)..(845): n is a, c, g, or t
  misc_feature (868)..(868): n is a, c, g, or t
  misc_feature (933)..(933): n is a, c, g, or t
  misc_feature (956)..(956): n is a, c, g, or t
  misc_feature (958)..(958): n is a, c, g, or t
  misc_feature (980)..(980): n is a, c, g, or t
  misc_feature (995)..(995): n is a, c, g, or t
  misc_feature (997)..(997): n is a, c, g, or t
  misc_feature (1011)..(1011): n is a, c, g, or t
  misc_feature (1019)..(1019): n is a, c, g, or t
  misc_feature (1029)..(1030): n is a, c, g, or t
  misc_feature (1034)..(1034): n is a, c, g, or t
  misc_feature (1048)..(1048): n is a, c, g, or t
  misc_feature (1053)..(1054): n is a, c, g, or t
  misc_feature (1064)..(1064): n is a, c, g, or t
  misc_feature (1069)..(1069): n is a, c, g, or t
  misc_feature (1072)..(1072): n is a, c, g, or t
  misc_feature (1079)..(1080): n is a, c, g, or t
  misc_feature (1082)..(1082): n is a, c, g, or t
  misc_feature (1084)..(1084): n is a, c, g, or t
  misc_feature (1090)..(1090): n is a, c, g, or t
  misc_feature (1095)..(1095): n is a, c, g, or t
  misc_feature (1101)..(1101): n is a, c, g, or t
  misc_feature (1104)..(1104): n is a, c, g, or t
  misc_feature (1108)..(1108): n is a, c, g, or t
  misc_feature (1111)..(1111): n is a, c, g, or t
nnaattagagaaattactatgagaggatcgcatcaccatcaccatcacggatcctatttaggtgacactatagaatcgtcgacccacgcgtccgatcaaaacgaggacgaacccattcgtgttagctaccatcggaatatccactataattcagtggtgaatcctaacaaggccaccattggtgtggggctgggcctgccatcattcaaaccagggtttgcagagcagtctctgatgaagaatgccataaaaacatcggaggagtcatggattgaacagcagatgctagaagacaagaaacgggccacagactgggaggccacaaatgaagccatcgaggagcaggtggctcgggaatcctacctgcagtggttgcgggatcaggagaaacaggctcgccaggtccgaggccccagccagccccggaaagccagcgccacatgcagttcggccacagcagcagcctccagtggcctggaggagtggactagccggtccccgcggcagcggagttcagcctcgtcacctgagcaccctgagctgcatgctgaattgggcatgaagcccccttccccaggcactgttttagctcttgccaaacctccttcgccctgtgcgccaggtacaagcagtcagttctcggcaggggccgaccgggcaacttccccccttgtgtccctctaccctgctttggagtgccgggccctcattcagcagatgtccccctctgcctttggtaagcctcctttgtctggggggatggaggctgctaggagctggganagactggaagaagtggcaagtcctgaaangggctttctggagcctctggccatctccccaanaaaagaagggagaggcactggangggatttttcagatccaagggaatttgccccaaaagggtctggggtctaaatggggtttcacagncctaacaaatccttctgtttttnanaaaggagtgaaaaggggccctntgggaatttctccananccccaaatgtcggnccaaggtnaaggaaaagnnaggntaaaaacccctccnatcanncctttttctntttcnccnccccccnnangntttaantgaangggatnaangatnaant

SEQ ID NO: 39 - DNA, 1073 bp, Homo Sapiens
  misc_feature (1)..(2): n is a, c, g, or t
  misc_feature (799)..(799): n is a, c, g, or t
  misc_feature (930)..(930): n is a, c, g, or t
  misc_feature (935)..(935): n is a, c, g, or t
  misc_feature (938)..(938): n is a, c, g, or t
  misc_feature (945)..(945): n is a, c, g, or t
  misc_feature (960)..(960): n is a, c, g, or t
  misc_feature (982)..(982): n is a, c, g, or t
  misc_feature (993)..(993): n is a, c, g, or t
  misc_feature (1007)..(1007): n is a, c, g, or t
  misc_feature (1011)..(1011): n is a, c, g, or t
  misc_feature (1022)..(1022): n is a, c, g, or t
  misc_feature (1028)..(1028): n is a, c, g, or t
  misc_feature (1030)..(1031): n is a, c, g, or t
  misc_feature (1047)..(1047): n is a, c, g, or t
  misc_feature (1051)..(1054): n is a, c, g, or t
  misc_feature (1061)..(1073): n is a, c, g, or t
nnattagagaaattactatgagaggatcgcatcaccatcaccatcacggatcctatttaggtgacactatagaatcgtcgacccacgcgtccgtgggcatgtacaacaccgacgagtccatctcaggttttgcgcacagctgcttccagtatgccatccagaagaaatggccgctgtacatgagcaccaagaacaccatactgaaagcctacgatgggcgtttcaaggacatcttccaggagatctttgacaagcactataagaccgacttcgacaagaataagatctggtatgagcaccggctcattgatgacatggtggctcaggtcctcaagtcttcgggtggctttgtgtgggcctgcaagaactatgacggagatgtgcagtcagacatcctggtctgccctgatgggaagacgattgaggctgaggccgctcatgggaccgtcacccgccactatcgggagcaccagaagggccggcccaccagcaccaaccccatcgccagcatctttgcctggacacgtggcctggagcaccgggggaagctggatgggaaccaagacctcatcaggtttgcccagatgctggagaaggtgtgcgtggagacggtggagagtggagccatgaccaaggacctggcgggctgcattcacggcctcagcaatgtgaagctgaacgagcacttcctgaacaccacggacttcctcgacaccatcaagagcaacctggacagagccctgggcaggcagtagggggaggcgccacccatggctgcagtggaggggccagggctganccggcgggtcctcctgagcgcggcagaaggtgagcctcacagcccctctctggaggcctttctaggggatgtttttttataagccaaaatgttttttaaaagcatatgtgtgtttccccctcatggtgacntgagncanggaccantgcgttttacctcanccagtcagtaatgtttttgcanactggaatttnaattggcccttggnaacncatgggggccntatttnanntactaaaaagctcttncccnnnnaaaaaannnnnnnnnnnnn

SEQ ID NO: 40 - DNA, 1164 bp, Homo Sapiens
  misc_feature (917)..(917): n is a, c, g, or t
  misc_feature (959)..(959): n is a, c, g, or t
  misc_feature (961)..(961): n is a, c, g, or t
  misc_feature (977)..(977): n is a, c, g, or t
  misc_feature (980)..(980): n is a, c, g, or t
  misc_feature (982)..(982): n is a, c, g, or t
  misc_feature (994)..(994): n is a, c, g, or t
  misc_feature (1002)..(1002): n is a, c, g, or t
  misc_feature (1026)..(1026): n is a, c, g, or t
  misc_feature (1028)..(1028): n is a, c, g, or t
  misc_feature (1041)..(1041): n is a, c, g, or t
  misc_feature (1050)..(1050): n is a, c, g, or t
  misc_feature (1052)..(1052): n is a, c, g, or t
  misc_feature (1067)..(1067): n is a, c, g, or t
  misc_feature (1069)..(1069): n is a, c, g, or t
  misc_feature (1073)..(1073): n is a, c, g, or t
  misc_feature (1076)..(1076): n is a, c, g, or t
  misc_feature (1082)..(1082): n is a, c, g, or t
  misc_feature (1084)..(1084): n is a, c, g, or t
  misc_feature (1086)..(1086): n is a, c, g, or t
  misc_feature (1092)..(1092): n is a, c, g, or t
  misc_feature (1095)..(1095): n is a, c, g, or t
  misc_feature (1123)..(1123): n is a, c, g, or t
  misc_feature (1127)..(1127): n is a, c, g, or t
  misc_feature (1136)..(1137): n is a, c, g, or t
  misc_feature (1152)..(1153): n is a, c, g, or t
  misc_feature (1158)..(1159): n is a, c, g, or t
  misc_feature (1163)..(1163): n is a, c, g, or t
attagagagattactatgagaggatcgcatcaccatcaccatcacggatcctatttaggtgacactatagaatcgtcgacccacgcgtccgtgtacatccaagagtctggtgaggagcaggagttcgctcaagatccaagaaaggtccgagattgcagattgagtacccagcacgaggaatcagcagatgagcagaaaggttctgaagcagaggggctcaaaggggatataatttctgtgattatcgccaataaacctgaggccagcttagagaggcagtgcgtaaaccttgaaaatgaaaaaggaacaaaaccccctcttcaagaggcaggctccaagaaaggtagagaatcagttcctactaaacctaccccaggagagagacgttatatatgtgctgaatgtggcaaagcctttagtaatagctcaaatctcaccaaacacaggagaacacacactggggagaaaccttacgtgtgcaccaagtgtgggaaagctttcagccacagctcaaacctcaccctccactacagaacacacttggtggaccggccctatgactgtaagtgtggaaaagcttttgggcagagctcagaccttcttaaacatcagagaatgcacacagaagaggcgccatatcagtgcaaagattgtggcaaggctttcagcgggaaaggcagcctcattcgtcactatcggatccacactggggagaagccttatcagtgtaacgaatgtgggaagagcttcagtcagcatgcgggcctcagctcccaccagagactccacaccggagagaagccatataagtgtaaggagtgtgggaaagccttcaaccacagctccaacttcaataaacaccacagaatccacaccggggaaaaacccctactggtgtcatcactgtgggaaagacnttctgtagcaagtccaatcttttccaaacatcaccgagtccncnctggaagaggggaganccncngtaactttcagncgcccctngttgttgtcgttgttttaaacttnanaatctgaaaaccnaaaaaaaantnttgttcttgccccancntccnatnccgggnananaatttnttntcccccccctccggggaatgcctgaggnatgncaacctccnncccacattggcaggnnggagnncccna

SEQ ID NO: 41 - DNA, 738 bp, Homo Sapiens
  misc_feature (3)..(3): n is a, c, g, or t
  misc_feature (6)..(11): n is a, c, g, or t
  misc_feature (427)..(427): n is a, c, g, or t
  misc_feature (501)..(501): n is a, c, g, or t
  misc_feature (521)..(521): n is a, c, g, or t
  misc_feature (527)..(527): n is a, c, g, or t
  misc_feature (535)..(535): n is a, c, g, or t
  misc_feature (560)..(560): n is a, c, g, or t
  misc_feature (594)..(594): n is a, c, g, or t
  misc_feature (618)..(618): n is a, c, g, or t
  misc_feature (634)..(634): n is a, c, g, or t
  misc_feature (639)..(639): n is a, c, g, or t
  misc_feature (650)..(650): n is a, c, g, or t
  misc_feature (655)..(656): n is a, c, g, or t
  misc_feature (660)..(661): n is a, c, g, or t
  misc_feature (671)..(671): n is a, c, g, or t
  misc_feature (673)..(673): n is a, c, g, or t
  misc_feature (676)..(676): n is a, c, g, or t
  misc_feature (679)..(679): n is a, c, g, or t
  misc_feature (688)..(688): n is a, c, g, or t
  misc_feature (698)..(698): n is a, c, g, or t
  misc_feature (704)..(704): n is a, c, g, or t
  misc_feature (724)..(724): n is a, c, g, or t
  misc_feature (729)..(729): n is a, c, g, or t
ctnctnnnnnnaatagagaaatactatgagaggatcgcatcaccatcaccatcacggatcctatttaggtgacactatagaatcgtcgacccacgcgtccggcagcgatcagcgccgccgcccgtgcctttcctcttcctcctcctcctccttggcatccgcctcttcttcctcctgcgtcctcccccgctgcctccgctgctcccgacgcggagcccggagcccgcgccgagcccctggcctcgcggtgccatgctgccccggcggcggcgctgaaggatggcgacgccgctgcctccgccctccccgcggcacctgcggctgctgcggctgctgctctccggcctcgtcctcggcgccgccctgcgtggagccgccgccggccacccggatgtagccgcctgtcccgggagcctggactgtgccntgaagaggcgggcaaggtgtcctcctggtgcacatgcctgtgggccctgccttcagcccttccaggaggaccancaagggctctgtgtgcccangatgcnccggcctncaggcgggggccggccccagcccanactggaagatgaaattgacttcctggcccaggancttgcccggaaggagtctggacantcaactccgcccctanccaangaccgacagangctannggannctgcctgggnancanagnctggaaaanaagcgcgganatgtancacttaccatcaccaacggnaacanaatgctgtg

SEQ ID NO: 42 - DNA, 859 bp, Homo Sapiens
  misc_feature (1)..(1): n is a, c, g, or t
  misc_feature (816)..(816): n is a, c, g, or t
  misc_feature (824)..(824): n is a, c, g, or t
  misc_feature (832)..(832): n is a, c, g, or t
  misc_feature (838)..(841): n is a, c, g, or t
  misc_feature (843)..(843): n is a, c, g, or t
  misc_feature (846)..(846): n is a, c, g, or t
  misc_feature (853)..(853): n is a, c, g, or t
  misc_feature (857)..(857): n is a, c, g, or t
  misc_feature (859)..(859): n is a, c, g, or t
naatagagaaattactatgagaggatcgcatcaccattcaccatcacgggatcctatttaggtgacactatagaatcgtcgacccacgcgtccgtctacataaagattccacaggttccactgctgtgtcagctacaagggtgagaagaacagtgtggactggggtgaccttaacctggtgctgccctgtctggagtaccacaacaacacatggacatggctagactttgccatggctgtcaaaagggacagccgcaaagccctggttgcccaggtaatcaaagagaagctaaggctgaagtctgcaacaggctctgaggtccggggaaagctagaaactaaatcggacctgaacatgcaacagcaggaagaggaggagaaagcccggctcctcattggtttaagtgtgggcgacaagaaccctggcaagaagtccatctttggcaggcgcaaatgatttggcgattcgagtggctgcagtacaggatctgactctggctcaggctccagggacttgtggggtgggaggggcttcccgttatccacgaggatttgtgggtgtcagagcccataggcatcactcttcagcacctggtctgttcgctgcagggcatggtggacagtaatgctgagttctgtctcacactgatcaggctcagggccagagaggcaacaagagagcaagacccagggaatgggcccagggcaggaccctattcccttggggtcaagtgaaagggtagggggatagtcctgatcaagtgtgataaatttttatagacatatataaatatatatatattatatatataaaanaaaaaaanaaaaaaanaataannnncnccnatataanatanan

SEQ ID NO: 43 - DNA, 1296 bp, Homo Sapiens
  misc_feature (1)..(1): n is a, c, g, or t
  misc_feature (876)..(876): n is a, c, g, or t
  misc_feature (879)..(879): n is a, c, g, or t
  misc_feature (915)..(915): n is a, c, g, or t
  misc_feature (937)..(937): n is a, c, g, or t
  misc_feature (942)..(942): n is a, c, g, or t
  misc_feature (953)..(953): n is a, c, g, or t
  misc_feature (956)..(956): n is a, c, g, or t
  misc_feature (966)..(966): n is a, c, g, or t
  misc_feature (1008)..(1008): n is a, c, g, or t
  misc_feature (1017)..(1017): n is a, c, g, or t
  misc_feature (1036)..(1036): n is a, c, g, or t
  misc_feature (1040)..(1040): n is a, c, g, or t
  misc_feature (1059)..(1059): n is a, c, g, or t
  misc_feature (1061)..(1061): n is a, c, g, or t
  misc_feature (1066)..(1066): n is a, c, g, or t
  misc_feature (1078)..(1078): n is a, c, g, or t
  misc_feature (1083)..(1083): n is a, c, g, or t
  misc_feature (1097)..(1097): n is a, c, g, or t
  misc_feature (1102)..(1102): n is a, c, g, or t
  misc_feature (1104)..(1104): n is a, c, g, or t
  misc_feature (1106)..(1106): n is a, c, g, or t
  misc_feature (1111)..(1111): n is a, c, g, or t
  misc_feature (1115)..(1115): n is a, c, g, or t
  misc_feature (1118)..(1118): n is a, c, g, or t
  misc_feature (1130)..(1130): n is a, c, g, or t
  misc_feature (1143)..(1145): n is a, c, g, or t
  misc_feature (1152)..(1152): n is a, c, g, or t
  misc_feature (1160)..(1160): n is a, c, g, or t
  misc_feature (1163)..(1163): n is a, c, g, or t
  misc_feature (1165)..(1165): n is a, c, g, or t
  misc_feature (1181)..(1182): n is a, c, g, or t
  misc_feature (1190)..(1190): n is a, c, g, or t
  misc_feature (1217)..(1217): n is a, c, g, or t
  misc_feature (1221)..(1221): n is a, c, g, or t
  misc_feature (1226)..(1226): n is a, c, g, or t
  misc_feature (1229)..(1229): n is a, c, g, or t
  misc_feature (1234)..(1234): n is a, c, g, or t
  misc_feature (1240)..(1240): n is a, c, g, or t
  misc_feature (1242)..(1242): n is a, c, g, or t
  misc_feature (1250)..(1250): n is a, c, g, or t
  misc_feature (1254)..(1254): n is a, c, g, or t
  misc_feature (1258)..(1258): n is a, c, g, or t
  misc_feature (1262)..(1262): n is a, c, g, or t
  misc_feature (1282)..(1282): n is a, c, g, or t
  misc_feature (1284)..(1284): n is a, c, g, or t
  misc_feature (1292)..(1292): n is a, c, g, or t
  misc_feature (1295)..(1295): n is a, c, g, or t
naaatagagaaattactatgagaggatcgcatcaccatcaccatcacggatcctatttaggtgacactatagaatcgtcgacccacgcgtccgcccacgcgtccgcggcggcgggagcggtcatggaggcgggcgccggagccggcgcgggagccgcgggctggagctgcccgggcccaggacccacagtgaccactctaggctcctatgaggcttccgagggctgtgagaggaagaagggccaacgctgggggtccctggaacgacgggggatgcaagctatggagggggaggtgttactcccagctctctatgaggaggaagaggaagaggaagaggaggaagaagaggtggaagaagaagaagaacaagtgcagaaaggtggcagtgttggctctctgtcagtcaacaagcaccggggactgagcctcacggagacagagctggaggagctgcgggctcaggtgctgcagctggtggcagaactggaggagacccgggaactggcagggcagcatgaggatgactccttggagctacaggggctcctggaggatgaacggctagccagcgcccagcaggcagaggtgttcaccaagcagatccagcagctccaaggtgagctgcgttctctacgggaggagatttccctgttagagcatgagaaagaaagcgaacttaaggaaatagaacaggaattgcatttggcccaggctgagatccagagtctgcggcaagcagcagaggattccgcaactgaacatgagagtgacatagcatccctgcaggaggatctctgccggatgcagaatgaacttgaagacatggaacgcattcggggagattatgagatggagatcgcctccctccgtgcanaantggaaatgaagagctctgaaccatccggtagtttangtctctcaaattactctgggtnacaanaaaaactgcanganctgcggaacnctaccatttcctgaatgaagaataccgggccctgcaggaaancaacagcancctcccggggcaacttgcnaatntggaaatgaaaggaccccnanagcanccaaaaatggcntcatnccaaacctgatttnacctncncnaattncaanttnaaaattgatttnttaaaccctatcnnnaatgccntttttacnccncncctccgattctaaaannaatctttnctttaaaaaatttccaaattttttttnattnaaaantcncctcnccccgncntaaaaaanaaancctncaanaactcatttccaaaaagttntnttttaacnccna

SEQ ID NO: 44 - DNA, 1059 bp, Homo Sapiens
  misc_feature (1)..(1): n is a, c, g, or t
  misc_feature (758)..(758): n is a, c, g, or t
  misc_feature (874)..(874): n is a, c, g, or t
  misc_feature (923)..(923): n is a, c, g, or t
  misc_feature (931)..(931): n is a, c, g, or t
  misc_feature (937)..(937): n is a, c, g, or t
  misc_feature (959)..(959): n is a, c, g, or t
  misc_feature (969)..(969): n is a, c, g, or t
  misc_feature (981)..(981): n is a, c, g, or t
  misc_feature (992)..(992): n is a, c, g, or t
  misc_feature (995)..(995): n is a, c, g, or t
  misc_feature (1015)..(1015): n is a, c, g, or t
  misc_feature (1020)..(1020): n is a, c, g, or t
  misc_feature (1022)..(1022): n is a, c, g, or t
  misc_feature (1029)..(1030): n is a, c, g, or t
  misc_feature (1037)..(1037): n is a, c, g, or t
  misc_feature (1042)..(1042): n is a, c, g, or t
  misc_feature (1047)..(1048): n is a, c, g, or t
  misc_feature (1050)..(1050): n is a, c, g, or t
  misc_feature (1055)..(1055): n is a, c, g, or t
  misc_feature (1058)..(1058): n is a, c, g, or t
naattagagaaattactatgagaggatcgcatcaccatcaccatcacggatcctatttaggtgacactatagaatcgtcgacccacgcgtccgctgtggctgatcggaagcagcctgttcctccaggacgtgctgcgcgttcaagccagtctccaaaaaagccgttcaatagtattattgagcatctgtcagtggtattcccatgttacaacagcactgagcttgctggttttattaaaaaagtgcgaagcaaaaacaagaactcactctcaggattgagtattgatgaaattgtccaaagagtgacagaacacattctagatgaacagaaaaagaaaaagccaaacccaggaaaggacaagaggacttatgagcccagctctgccacccccgtgaccaggtcctcccagggctcaccctcggtggttgttgcaccatcacccaaaaccaaggggcagaaagcagaagatgtccctgtgaggattgcactgggtgcaagttcctgtgaaatatgccacgaggtgttcaaatcaaaaaacgtgcgtgtgctcaaatgtgggcacaagtatcacaaagggtgctttaagcagtggcttaaagggcagagcgcttgcccggcctgccagggtcgtgatctcctgacagaagagtcaccttctggaagaggctggcccagtcagaatcaggagctgccttcctgctcttctaggtagtcacacttcactaaagtgtcatccaccagtgtgttgaatccgaanaatgacaattttctaccactggtgtaaaaaacaaacattttgaagacccttgtgcattgtgtgtcacaaagctaaatacatggaaatcgttaaaatcgttgatattaagtaatttnccccactctgagtgaaatacttttgaatgattgccaaccagtggctaanaaaaatgnacggcntaccacacctccatggggttcncttggggctnccgcaagggctnttttgaaggtnggntggctttctttttggaaaanaactntnaaacgtnntccgaanccaantattnntnggganaana

SEQ ID NO: 45 - DNA, 814 bp, Homo Sapiens
  misc_feature (1)..(1): n is a, c, g, or t
  misc_feature (433)..(433): n is a, c, g, or t
  misc_feature (479)..(479): n is a, c, g, or t
  misc_feature (507)..(507): n is a, c, g, or t
  misc_feature (525)..(525): n is a, c, g, or t
  misc_feature (549)..(549): n is a, c, g, or t
  misc_feature (580)..(580): n is a, c, g, or t
  misc_feature (592)..(592): n is a, c, g, or t
  misc_feature (601)..(601): n is a, c, g, or t
  misc_feature (616)..(616): n is a, c, g, or t
  misc_feature (625)..(625): n is a, c, g, or t
  misc_feature (628)..(628): n is a, c, g, or t
  misc_feature (645)..(645): n is a, c, g, or t
  misc_feature (653)..(653): n is a, c, g, or t
  misc_feature (656)..(656): n is a, c, g, or t
  misc_feature (663)..(663): n is a, c, g, or t
  misc_feature (684)..(684): n is a, c, g, or t
  misc_feature (689)..(689): n is a, c, g, or t
  misc_feature (693)..(693): n is a, c, g, or t
  misc_feature (696)..(696): n is a, c, g, or t
  misc_feature (698)..(698): n is a, c, g, or t
  misc_feature (724)..(724): n is a, c, g, or t
  misc_feature (726)..(726): n is a, c, g, or t
  misc_feature (732)..(732): n is a, c, g, or t
  misc_feature (748)..(748): n is a, c, g, or t
  misc_feature (750)..(750): n is a, c, g, or t
  misc_feature (752)..(752): n is a, c, g, or t
  misc_feature (758)..(758): n is a, c, g, or t
  misc_feature (760)..(760): n is a, c, g, or t
  misc_feature (764)..(764): n is a, c, g, or t
  misc_feature (772)..(772): n is a, c, g, or t
  misc_feature (776)..(776): n is a, c, g, or t
  misc_feature (780)..(780): n is a, c, g, or t
  misc_feature (790)..(792): n is a, c, g, or t
  misc_feature (807)..(808): n is a, c, g, or t
  misc_feature (814)..(814): n is a, c, g, or t
naaatagagaaattactatgagaggatcgcatcaccatcaccatcacggatcctatttaggtgacactatagaatcgtcgacccacgcgtccgggcctcaacctgaaggtggtgcagcttttccgcgacccgagggcggtgcacaactcgcgcctcaagtctaggcagggactgctgcgcgagagcatccaggtgctgcgcacccgccagaggggcgaccgcttccaccgtgtgctgctggcgcacggcgtgggtgctcgccccgggggccagtctcgcgcgctgcccgccgcgccgcgcgccgatttcttcctgaccggtgcgctcgaggtgatctgcgaagcctggctgcgcgatctgcttttcgcgcgcggcgcgcccgcctggctgcggcgccgctacctgaggctgcgctatgaggacctggtgcggnagccacgcgcccagctgcgccgcctgctgcgcttctccgggctacncgcgctcgcagcgctcgatgccttcgcnctcaacatgactcgcggngcggcctaaggacgccgaccggcncttccacctgtcagcgcgcgacgcccgggangcggtgcacgcntggcgcgancgactgaaccgagancatgtgcgncangtgtgaggccgcctgcnctccaccnatncgtctgntcgcctaccctcgcatcaganatgangtcnacncntagcaacccatggaaaagggaatacncncgctgnaacatggatgctcgangnanccactnancctnccaatccntgtncccnggatcggatnnnggataaatcacccanntaacan

SEQ ID NO: 46 - DNA, 1175 bp, Homo Sapiens
  misc_feature (939)..(939): n is a, c, g, or t
  misc_feature (941)..(941): n is a, c, g, or t
  misc_feature (977)..(977): n is a, c, g, or t
  misc_feature (983)..(983): n is a, c, g, or t
  misc_feature (990)..(990): n is a, c, g, or t
  misc_feature (992)..(992): n is a, c, g, or t
  misc_feature (995)..(995): n is a, c, g, or t
  misc_feature (999)..(999): n is a, c, g, or t
  misc_feature (1010)..(1010): n is a, c, g, or t
  misc_feature (1018)..(1018): n is a, c, g, or t
  misc_feature (1026)..(1026): n is a, c, g, or t
  misc_feature (1028)..(1028): n is a, c, g, or t
  misc_feature (1035)..(1035): n is a, c, g, or t
  misc_feature (1037)..(1037): n is a, c, g, or t
  misc_feature (1050)..(1050): n is a, c, g, or t
  misc_feature (1052)..(1052): n is a, c, g, or t
  misc_feature (1076)..(1076): n is a, c, g, or t
  misc_feature (1079)..(1079): n is a, c, g, or t
  misc_feature (1082)..(1082): n is a, c, g, or t
  misc_feature (1090)..(1090): n is a, c, g, or t
  misc_feature (1096)..(1096): n is a, c, g, or t
  misc_feature (1110)..(1110): n is a, c, g, or t
  misc_feature (1116)..(1116): n is a, c, g, or t
  misc_feature (1121)..(1121): n is a, c, g, or t
  misc_feature (1126)..(1126): n is a, c, g, or t
  misc_feature (1141)..(1141): n is a, c, g, or t
  misc_feature (1149)..(1150): n is a, c, g, or t
  misc_feature (1155)..(1155): n is a, c, g, or t
  misc_feature (1160)..(1160): n is a, c, g, or t
  misc_feature (1162)..(1162): n is a, c, g, or t
  misc_feature (1166)..(1166): n is a, c, g, or t
  misc_feature (1169)..(1169): n is a, c, g, or t
tagagaaattactatgagaggatcgcatcaccatcaccatcacggatcctatttaggtgacactatagaatcgtcgacccacgcgtccggaggtgcaccatccatcacatctgtcacaccaagaggactgtgcagagatgaggaagacacctcttttgaatcactttctaaattcaatgtcaagtttccacctatggacaatgactcaactttcttacatagcactccagagagacccggcatccttagtcctgccacgtctgaggcagtgtgccaagagaaatttaatatggagttcagagacaacccagggaactttgttaaaacagaagaaactttatttgaaattcagggaattgaccccatagcttcagctatacaaaaccttaaaacaactgacaaaacaaagccctcaaatctcgtaaacacttgtatcaggacaactctggatagagctgcgtgtttgccacctggagaccataatgcattatatgtaaatagcttcccacttctggacccatctgatgcaccttttccctcactcgattccccgggaaaagcaatccgaggaccacagcagcccatttggaagccctttcctaatcaagacagtgactcggtggtactaagtggcacagactcagaactgcatatacctcgagtatgtgaattctgtcaagcagttttcccaccatccattacatccaggggggatttccttcggcatcttaattcacacttcaatggagagacttaagacacatttgaaaacagacatatcaagttctatgtgatgattttgggtttttaatactataaatacttgattgtaaactaaattcaagatcatttataggaaaatctagtttcacagctatttgaatttttttctggatttactatataactcttattttttaaaagatcattctgttcttncnaggagaataagcctaaaagaagaaaacaaaaaaatnctgtanaaactgnanccntggnatcaggttacngggctatnactaaatncnaattagnangggactaagtaananccaattttgttattcaaaatcaanttntgntggattcnagggancggtgaatgggggncaagtncaggnttttnttttttttgaaattntttttggnnagggnattcntngaanccnaaaaaa

SEQ ID NO: 47 - DNA, 891 bp, Homo Sapiens
  misc_feature (685)..(685): n is a, c, g, or t
  misc_feature (691)..(691): n is a, c, g, or t
  misc_feature (706)..(706): n is a, c, g, or t
  misc_feature (754)..(754): n is a, c, g, or t
  misc_feature (756)..(756): n is a, c, g, or t
  misc_feature (775)..(775): n is a, c, g, or t
  misc_feature (780)..(780): n is a, c, g, or t
  misc_feature (801)..(801): n is a, c, g, or t
  misc_feature (806)..(806): n is a, c, g, or t
  misc_feature (832)..(832): n is a, c, g, or t
  misc_feature (838)..(838): n is a, c, g, or t
  misc_feature (842)..(842): n is a, c, g, or t
  misc_feature (846)..(846): n is a, c, g, or t
  misc_feature (852)..(852): n is a, c, g, or t
  misc_feature (856)..(856): n is a, c, g, or t
  misc_feature (866)..(866): n is a, c, g, or t
  misc_feature (871)..(872): n is a, c, g, or t
  misc_feature (874)..(875): n is a, c, g, or t
  misc_feature (881)..(881): n is a, c, g, or t
  misc_feature (884)..(887): n is a, c, g, or t
agagaaattactatgagaggatcgcatcaccatcaccatcacggatcctatttaggtgacactatagaatcgtcgacccacgcgtccgcgcagatcacgcagtaccgcagccaccctgtggacgtgtatgccggcttcctcatcggggcgggcatcgctgcctacctggcctgccacgcggtgggcaacttccaggccccacctgcagagaagcccgcggccccggcccccgccaaggacgcgctgcgggccctgacgcagcggggccacgactcggtttatcagcagaataagtcggtgagcaccgacgagctggggcccccagggcggctggagggcgcgccccggcccgtggcccgcgagaagacctcgctgggcagcctgaagcgcgccagcgtggacgtggacctgctggccccgcgcagccccatggccaaggagaacatggtgaccttcagccacacgctgcccagggccagcgcgccctcgctggacgaccccgcgcgccgccacatgaccatccacgtgccgctggacgcctcgcgctccaagcagctcatcagcgagtggaagcagaagagcctggagggccgcggcctggggctgcccgacgacgccagccccgggcacctgcgcgcgcccgccgaacccatggcggaggaggaggaagaggaggaggacgaanaggaanaggaggaggaggaanaggaggaggacgagggcccggccccgccctcgctctaccccaccgtgnangcgcggccggggctggggncctcnggtcatcctcccaccgcgcgnggggncgccgccgctggtgcacatcccggangaaggngcgnaaangggggncggnctgttccccnaaaanngnnccgggntgnnnnccaa

SEQ ID NO: 48 - DNA, 1107 bp, Homo Sapiens
  misc_feature (901)..(901): n is a, c, g, or t
  misc_feature (938)..(938): n is a, c, g, or t
  misc_feature (948)..(948): n is a, c, g, or t
  misc_feature (950)..(950): n is a, c, g, or t
  misc_feature (959)..(959): n is a, c, g, or t
  misc_feature (986)..(987): n is a, c, g, or t
  misc_feature (1003)..(1003): n is a, c, g, or t
  misc_feature (1012)..(1012): n is a, c, g, or t
  misc_feature (1014)..(1014): n is a, c, g, or t
  misc_feature (1022)..(1022): n is a, c, g, or t
  misc_feature (1029)..(1029): n is a, c, g, or t
  misc_feature (1037)..(1040): n is a, c, g, or t
  misc_feature (1048)..(1048): n is a, c, g, or t
  misc_feature (1061)..(1061): n is a, c, g, or t
  misc_feature (1081)..(1082): n is a, c, g, or t
  misc_feature (1094)..(1097): n is a, c, g, or t
  misc_feature (1105)..(1105): n is a, c, g, or t
attagagagattactatgagaggatcgcatcaccatcaccatcacggatcctatttaggtgacactatagaatcgtcgacccacgcgtccggtcctcttcatgcgcagcgacgactcgcgggagctcattgcagccgccagccgcgccaatgcctccttcacctgggtggccagcgacggctggggcgcgcaggagagcatcatcaagggcagcgagcatgtggcctacggcgccatcaccctggagctggcctcccagcctgtccgccagttcgaccgctacttccagagcctcaacccctacaacaaccaccgcaacccctggttccgggacttctgggagcaaaagtttcagtgcagcctccagaacaaacgcaaccacaggcgcgtctgcgacaagcacctggccatcgacagcagcaactacgagcaagagtccaagatcatgtttgtggtgaacgcggtgtatgccatggcccacgctttgcacaaaatgcagcgcaccctctgtcccaacactaccaagctttgtgatgctatgaagatcctggatgggaagaagttgtacaaggattacttgctgaaaatcaacttcacggctccattcaacccaaataaagatgcagatagcatagtcaagtttgacacttttggagatggaatggggcgatacaacgtgttcaatttccaaaatgtaggtggaaagtattcctacttgaaagttggtcactgggcagaaaccttatcgctagatgtcaactctatccactggtcccggaactcagtccccacttcccagtgcagcgacccctgtgcccccaatgaaatgaagaatatgcaaccaggggatgtctgctgctggatttgcatcccctgtgaaccctacgaatacctggctgangagtttacctgtatggattgtgggtctggacagtggncccactgcanancttaactgnatgctaatgacctttcctgaagaactnnatcaggtgggaaaaangcctgggcnantggcccantcaccanttgcctgnnnngggttttnatgggtaaatgcntgggtggaaatgttttttannaagccaaaaaannnnccttggtnaa

SEQ ID NO: 49 - DNA, 629 bp, Homo Sapiens
atagagaaattactatgagaggatcgcatcaccatcaccatcacggatcctatttaggtgacactatagaatcgtcgacccacgcgtccggtgaaaagaaggcacggaaggctatgtccaaactgggtcttcggcaggttacaggagttactagagtcactatccggaaatctaagaatatcctctttgtcatcacaaaaccagatgtctacaagagccctgcttcagatacttacatagtttttggggaagccaagatcgaagatttatcccagcaagcacaactagcagctgctgagaaattcaaagttcaaggtgaagctgtctcaaacattcaagaaaacacacagactccaactgtacaagaggagagtgaagaggaagaggtcgatgaaacaggtgtagaagttaaggacatagaattggtcatgtcacaagcaaatgtgtcgagagcaaaggcagtccgagccctgaagaacaacagtaatgatattgtaaatgcgattatggaattaacaatgtaaccatatggaagcaactttttttggtgtctcaaaggagtaactgcagcttggtttgaaatttgtactgtttctatcataaataaagttatggcttcttgttggatg

SEQ ID NO: 50 - DNA, 716 bp, Homo Sapiens
  misc_feature (2)..(2): n is a, c, g, or t
  misc_feature (383)..(383): n is a, c, g, or t
  misc_feature (426)..(426): n is a, c, g, or t
  misc_feature (437)..(437): n is a, c, g, or t
  misc_feature (458)..(458): n is a, c, g, or t
  misc_feature (466)..(466): n is a, c, g, or t
  misc_feature (470)..(470): n is a, c, g, or t
  misc_feature (501)..(501): n is a, c, g, or t
  misc_feature (529)..(529): n is a, c, g, or t
  misc_feature (541)..(541): n is a, c, g, or t
  misc_feature (547)..(547): n is a, c, g, or t
  misc_feature (565)..(565): n is a, c, g, or t
  misc_feature (571)..(571): n is a, c, g, or t
  misc_feature (577)..(577): n is a, c, g, or t
  misc_feature (584)..(584): n is a, c, g, or t
  misc_feature (588)..(588): n is a, c, g, or t
  misc_feature (591)..(591): n is a, c, g, or t
  misc_feature (594)..(595): n is a, c, g, or t
  misc_feature (598)..(598): n is a, c, g, or t
  misc_feature (600)..(600): n is a, c, g, or t
  misc_feature (611)..(611): n is a, c, g, or t
  misc_feature (622)..(622): n is a, c, g, or t
  misc_feature (624)..(624): n is a, c, g, or t
  misc_feature (626)..(626): n is a, c, g, or t
  misc_feature (639)..(639): n is a, c, g, or t
  misc_feature (652)..(652): n is a, c, g, or t
  misc_feature (660)..(660): n is a, c, g, or t
  misc_feature (663)..(663): n is a, c, g, or t
  misc_feature (665)..(665): n is a, c, g, or t
  misc_feature (668)..(668): n is a, c, g, or t
  misc_feature (685)..(685): n is a, c, g, or t
  misc_feature (689)..(689): n is a, c, g, or t
  misc_feature (699)..(699): n is a, c, g, or t
  misc_feature (702)..(702): n is a, c, g, or t
  misc_feature (709)..(709): n is a, c, g, or t
antagagagaattactatgagaggatcgcatcaccatcaccatcacggatcctatttaggtgacactatagaatcgtcgacccacgcgtccgcccacgcgtccgctagtccaagtgtccggcaaacttggatccatgaaatcaaccaaattttagaaaaccagcgcaattttttaaatgccttgacatcgccaatcgagtaccagaggaaccacagcgggggcggcggcggcggcggcagcgggggcagcggcgggggtgggggcagcggcggcggcggggcccccagtggcggcagcggccacagtggcggccccagcagctgcggcggcgcccccagcacgagcaggagccggccctcccggatcccccagcctgtccganaccacccccccgtgctggtctcctctgcagcctcgagccaggnagaggcagatnagatgtcagagtgaaagcaanagcagtancaanatctccaccatgttggtgacacacgattacncggccagtgaaggaggatgatatcaacntctaccaagganaggtcnttcaaattctggccagcnaaccancataanatgtttntggngtntcnnagncnccactgaccantgccccgcaantnanggctggattccangctttgtcctggnccaaccantgnantcntcgtgaagaacccgganttgnactcttcagnaantccactntcttggc

SEQ ID NO: 51 - DNA, 1016 bp, Homo Sapiens
  misc_feature (2)..(2): n is a, c, g, or t
  misc_feature (800)..(800): n is a, c, g, or t
  misc_feature (869)..(869): n is a, c, g, or t
  misc_feature (879)..(880): n is a, c, g, or t
  misc_feature (896)..(896): n is a, c, g, or t
  misc_feature (910)..(910): n is a, c, g, or t
  misc_feature (917)..(917): n is a, c, g, or t
  misc_feature (922)..(922): n is a, c, g, or t
  misc_feature (926)..(927): n is a, c, g, or t
  misc_feature (929)..(929): n is a, c, g, or t
  misc_feature (934)..(934): n is a, c, g, or t
  misc_feature (938)..(938): n is a, c, g, or t
  misc_feature (943)..(943): n is a, c, g, or t
  misc_feature (948)..(948): n is a, c, g, or t
  misc_feature (953)..(953): n is a, c, g, or t
  misc_feature (960)..(960): n is a, c, g, or t
  misc_feature (971)..(971): n is a, c, g, or t
  misc_feature (973)..(973): n is a, c, g, or t
  misc_feature (983)..(983): n is a, c, g, or t
  misc_feature (986)..(986): n is a, c, g, or t
  misc_feature (994)..(994): n is a, c, g, or t
  misc_feature (1008)..(1008): n is a, c, g, or t
  misc_feature (1012)..(1012): n is a, c, g, or t
  misc_feature (1014)..(1014): n is a, c, g, or t
cnaatagagagaattactatgagaggatcgcatcaccatcaccatcacggatcctatttaggtgacactatagaatcgtcgacccacgcgtccgcccacgcgtccgcccacgcgtccgaggctagcctgcgagccacctcctctactcagtctctagctcgcctgggttctcccgattatggcaactcagccctgctcagcttgcctggctaccgccccaccactcgcagttctgctcgtcgttcccaggccggggtgtccagtggggcccctccaggaaggaacagcttctacatgggcacttgccaggatgagcctgagcagctggatgactggaaccgcattgcagagctgcagcagcgcaatcgagtgtgccccccacatctgaagacctgctatcccctggagtccaggccttccctgagcctgggcaccatcacagatgaggagatgaaaactggagacccccaagagaccctgcgccgagccagcatgcagccaatccagatagccgagggcactggcatcaccacccggcagcagcgcaaacgggtctccctagagccccaccagggccctggaactcctgagtctaagaaggccaccagctgtttcccacgccccatgactccccgagaccgacatgaagggcgcaaacagagcactactgaggcccagaagaaagcagctccagcttctactaaacaggctgaccggcgccagtcgatggccttcagcatcctcaacacacccaagaagctagggaacagccttctgcggcggggagcctcaaagaaggncctgtccaaggcttcccccaacactcgcagtggaacccgccgttctccgcgcattgccaccaccacagncagcgccgcnntgctgccgccattggngccacccctcgagncaagggnaaggnaaannantaaangggncaatnaccantgagnggcccanctgtgtccccnangctgccgtanctnggtctccncccaaatgtccctntaangnct

SEQ ID NO: 52 - DNA, 875 bp, Homo Sapiens
  misc_feature (1)..(2): n is a, c, g, or t
  misc_feature (681)..(681): n is a, c, g, or t
  misc_feature (705)..(705): n is a, c, g, or t
  misc_feature (736)..(736): n is a, c, g, or t
  misc_feature (747)..(747): n is a, c, g, or t
  misc_feature (752)..(753): n is a, c, g, or t
  misc_feature (755)..(755): n is a, c, g, or t
  misc_feature (787)..(787): n is a, c, g, or t
  misc_feature (795)..(796): n is a, c, g, or t
  misc_feature (800)..(800): n is a, c, g, or t
  misc_feature (818)..(819): n is a, c, g, or t
  misc_feature (822)..(822): n is a, c, g, or t
  misc_feature (824)..(825): n is a, c, g, or t
  misc_feature (847)..(847): n is a, c, g, or t
  misc_feature (849)..(849): n is a, c, g, or t
  misc_feature (853)..(853): n is a, c, g, or t
  misc_feature (855)..(855): n is a, c, g, or t
  misc_feature (857)..(857): n is a, c, g, or t
  misc_feature (862)..(863): n is a, c, g, or t
  misc_feature (866)..(866): n is a, c, g, or t
nnataaagagagaattactatgagaggatcgcatcaccatcaccatcacggatcctatttaggtgacactatagaatcgtcgacccacgcgtccgcccacgcgtccgccaaagggcgtgaacgtccgcatcgctgtgagcaagcccagcgggccccagccacaggcggacctgcaggctctgctgcagagcggtgcccaggtccgcatggtggacatgcagaagctgacccatggcgtcctgcataccaagttctgggtggtggaccagacccacttctacctgggcagtgccaacatggactggcgttcactgacccaggtcaaggagctgggcgtggtcatgtacaactgcagctgcctggctcgagacctgaccaagatctttgaggcctactggttcctgggccaggcaggcagctccatcccatcaacttggccccggttctatgacacccgctacaaccaagagacaccaatggagatctgcctcaatggaacccctgctctggcctacctggcgagtgcgcccccacccctgtgtccaagtggccgcactccagacctgaaggctctactcaacgtggtggacaatgcccggagtttcatctacgtcgctgtcatgaactacctgcccactctggagttctcccaccctcacaggttctggcctgccattgacnatgggctgcggcgggccacctacnagcgtggcgtcaaggtgcgcctgctcatcanctgctgggganactcnnanccatccatgcgggccttcctgctctctctggntgccctgnntganaaccatacccactctganntcnanntgaaactctttgtggtcccccncngatnangnccaanntcnaatcccata

SEQ ID NO: 53 - DNA, 892 bp, Homo Sapiens
  misc_feature (3)..(3): n is a, c, g, or t
  misc_feature (582)..(582): n is a, c, g, or t
  misc_feature (670)..(670): n is a, c, g, or t
  misc_feature (703)..(703): n is a, c, g, or t
  misc_feature (721)..(721): n is a, c, g, or t
  misc_feature (739)..(739): n is a, c, g, or t
  misc_feature (749)..(750): n is a, c, g, or t
  misc_feature (779)..(779): n is a, c, g, or t
  misc_feature (783)..(783): n is a, c, g, or t
  misc_feature (794)..(794): n is a, c, g, or t
  misc_feature (813)..(813): n is a, c, g, or t
  misc_feature (817)..(817): n is a, c, g, or t
  misc_feature (824)..(824): n is a, c, g, or t
  misc_feature (829)..(829): n is a, c, g, or t
  misc_feature (832)..(832): n is a, c, g, or t
  misc_feature (834)..(834): n is a, c, g, or t
  misc_feature (840)..(840): n is a, c, g, or t
  misc_feature (842)..(842): n is a, c, g, or t
  misc_feature (847)..(847): n is a, c, g, or t
  misc_feature (856)..(857): n is a, c, g, or t
  misc_feature (863)..(863): n is a, c, g, or t
  misc_feature (871)..(872): n is a, c, g, or t
  misc_feature (876)..(876): n is a, c, g, or t
  misc_feature (880)..(880): n is a, c, g, or t
  misc_feature (884)..(884): n is a, c, g, or t
atntagagaaattactatgagaggatcgcatcaccatcaccatcacggatcctatttaggtgacactatagaatcgtcgacccacgcgtccggcgcggcggctgctggagccgggggcggcggagccagccgagcgcggcgcggagccggaggcgggcgcggagccggcgggggccgaggtggctgggcccggggccgcagcggcgggggcagtcggggctccggtgcccgtggattgctcggacgaggcgggcaacaccgcactgcagttcgccgcggccgggggccacgaaccgctggtgcgcttcctgctgcgccgcggtgcctcggtcaacagccgcaaccactacggctggagcgcgctcatgcaggcggccagatgaggagaaaaggcgacctgatattttccatgcattgaaaatgggaaacttccagctggtcaaagagattgccgatgaagaccccagccacgtgaacttggtcaatggggacggggcgacgccactgatgctagcagctgttacggggcagctggctctggtgcagctgctggtggagaggcacgcggatgttgacaagcangacagcgtgcatggctggacggccctcatgcaggcaacctaccatggacacggaacttgttcgactgctggcatctgtctgcatgcangtgaataaagacaaaggccggccgagccaccancctcccctgccccactcnaaggtccgacagccctgnagcatcccanntgctgcccgatgacaagggtggaatgaanttcntggtggaaccnaatgtccaaatcggttccnaaanctcaaantgatncananctgccncntgggnttgtccaannaaccanccttttgnntttntttnaacnaaccctaa

SEQ ID NO: 54 - DNA, 586 bp, Homo Sapiens
  misc_feature (5)..(7): n is a, c, g, or t
  misc_feature (12)..(12): n is a, c, g, or t
  misc_feature (345)..(345): n is a, c, g, or t
  misc_feature (361)..(361): n is a, c, g, or t
  misc_feature (429)..(429): n is a, c, g, or t
  misc_feature (475)..(475): n is a, c, g, or t
  misc_feature (496)..(496): n is a, c, g, or t
  misc_feature (505)..(505): n is a, c, g, or t
  misc_feature (520)..(520): n is a, c, g, or t
  misc_feature (531)..(531): n is a, c, g, or t
  misc_feature (534)..(534): n is a, c, g, or t
  misc_feature (538)..(539): n is a, c, g, or t
  misc_feature (541)..(541): n is a, c, g, or t
  misc_feature (545)..(545): n is a, c, g, or t
  misc_feature (552)..(553): n is a, c, g, or t
  misc_feature (558)..(558): n is a, c, g, or t
  misc_feature (562)..(562): n is a, c, g, or t
  misc_feature (568)..(568): n is a, c, g, or t
  misc_feature (570)..(570): n is a, c, g, or t
  misc_feature (572)..(572): n is a, c, g, or t
  misc_feature (581)..(581): n is a, c, g, or t
aaaannnagganaataactatgagaggatcgcatcaccatcaccatcacggatcctatttaggtgacactatagaatcgtcgacccacgcgtccggcgccctgtcctccgtcggctctgcgggctcccgggcctacagcggcctgcggcagaaatgcccctccgggctaggagcgacggcgccggcccgctatactcgcaccacctccccacctccccgctgcagaaagcgctgttggccgccggctccgcggcgatggcgctctataacccctaccgccacgacatggtcgcagttctaggggagaccacaggacaccgcaccctgaaggtcctcagggaccanatgaggagggatccanagggtgcccagatcctgcaggagcgtccccggatttcgacatccaccctcgacctgggcaagctccanagcctgccggaaggctccctcggtcgcgagtatctccgtttcctgnatgtgaacagggtctccccanacacccgancacccacccgcttcntggatgatganganctanngnatgngattcannggtancggnaggtgnananatgcttcanaccct

SEQ ID NO: 55 - DNA, 1181 bp, Homo Sapiens
  misc_feature (930)..(930): n is a, c, g, or t
  misc_feature (939)..(939): n is a, c, g, or t
  misc_feature (991)..(991): n is a, c, g, or t
  misc_feature (998)..(998): n is a, c, g, or t
  misc_feature (1002)..(1002): n is a, c, g, or t
  misc_feature (1026)..(1026): n is a, c, g, or t
  misc_feature (1038)..(1038): n is a, c, g, or t
  misc_feature (1041)..(1041): n is a, c, g, or t
  misc_feature (1047)..(1047): n is a, c, g, or t
  misc_feature (1054)..(1054): n is a, c, g, or t
  misc_feature (1067)..(1067): n is a, c, g, or t
  misc_feature (1070)..(1070): n is a, c, g, or t
  misc_feature (1075)..(1075): n is a, c, g, or t
  misc_feature (1077)..(1077): n is a, c, g, or t
  misc_feature (1080)..(1080): n is a, c, g, or t
  misc_feature (1094)..(1094): n is a, c, g, or t
  misc_feature (1104)..(1104): n is a, c, g, or t
  misc_feature (1108)..(1109): n is a, c, g, or t
  misc_feature (1114)..(1114): n is a, c, g, or t
  misc_feature (1123)..(1124): n is a, c, g, or t
  misc_feature (1144)..(1144): n is a, c, g, or t
  misc_feature (1155)..(1156): n is a, c, g, or t
  misc_feature (1168)..(1169): n is a, c, g, or t
  misc_feature (1172)..(1172): n is a, c, g, or t
  misc_feature (1175)..(1175): n is a, c, g, or t
  misc_feature (1177)..(1177): n is a, c, g, or t
  misc_feature (1181)..(1181): n is a, c, g, or t
caatagagagattactatgagaggatcgcatcaccatcaccatcacggatcctatttaggtgacactatagaatcgtcgacccacgcgtccgcagagctctccagagttcaagggctccctggcctccctctcagacagcttgggggtgtctgtcatggccaccgaccaggactcctactccaccagcagcacggaggaggagctggagcagttcagcagccccagcgtgaagaagaagccctccatgatcctgggcaaggctcggcaccggctgagctttgccagtttcagcagcatgttccacgctttcctctccaacaaccgcaagctgtacaagaaggtggtggagctggcgcaggacaagggctcgtactttggcagcctggtgcaggactacaaggtgtacagcctggagatgatggcgcgccagacctccagcacggagatgctgcaggagattcgcaccatgatgacccagctcaagagctacctgctgcagagcaccgagctcaaggccctggtggaccccgccctgcactccgaggaggagctcgaagcaattgtagagtctgccttgtacaaatgtgtcctgaagcccctgaaggaagccatcaactcatgcctgcatcagatccacagcaaggatggttcgctgcagcagctcaaggagaaccagttagtgatcctggccaccaccaccactgacctaggtgtgaccaccagcgtgccggaggtgcccatgatggagaagatcctgcagaagttcaccagcatgcacaaggcctactcacctgagaagaagatctccatcctgctcaagacctgcaaactcatctacgactccatggccctcggcaacccagggaagccctatgggggcggatgacttcctgcctgtgctcatgtatgtgctggccccgcaaccaacntcacggaanatgcttctcaatgtggagtacatgatggagctcatggaaccccgccctgcanctggggnaggnttctaatatctgaccaccacctangggggcctggancanatcaanaactacnaaaaaatcccggnganccgcnanttnaatggggaagtgcngattcctccnccgnnggganggccggggnnttttcaaaaaggccgggccnccccctccccnnaaagaatttttnnggntcnanctgn

SEQ ID NO: 56 - DNA, 1101 bp, Homo Sapiens
  misc_feature (893)..(893): n is a, c, g, or t
  misc_feature (895)..(895): n is a, c, g, or t
  misc_feature (899)..(899): n is a, c, g, or t
  misc_feature (913)..(913): n is a, c, g, or t
  misc_feature (923)..(923): n is a, c, g, or t
  misc_feature (949)..(949): n is a, c, g, or t
  misc_feature (958)..(958): n is a, c, g, or t
  misc_feature (961)..(962): n is a, c, g, or t
  misc_feature (977)..(978): n is a, c, g, or t
  misc_feature (983)..(983): n is a, c, g, or t
  misc_feature (1004)..(1004): n is a, c, g, or t
  misc_feature (1008)..(1009): n is a, c, g, or t
  misc_feature (1013)..(1013): n is a, c, g, or t
  misc_feature (1025)..(1025): n is a, c, g, or t
  misc_feature (1038)..(1038): n is a, c, g, or t
  misc_feature (1042)..(1042): n is a, c, g, or t
  misc_feature (1048)..(1048): n is a, c, g, or t
  misc_feature (1050)..(1051): n is a, c, g, or t
  misc_feature (1058)..(1058): n is a, c, g, or t
  misc_feature (1061)..(1061): n is a, c, g, or t
  misc_feature (1067)..(1067): n is a, c, g, or t
  misc_feature (1079)..(1079): n is a, c, g, or t
  misc_feature (1082)..(1082): n is a, c, g, or t
  misc_feature (1085)..(1085): n is a, c, g, or t
  misc_feature (1087)..(1087): n is a, c, g, or t
  misc_feature (1089)..(1089): n is a, c, g, or t
aatagagaaattactatgagaggatcgcatcaccatcaccatcacggatcctatttaggtgacactatagaatcgtcgacccacgcgtccgcccccacccccaacagcttcacctcagcggtccccatcgcccctgtctggccatgtagcccaggcctttcccacaaagcttcacttgtcacctcccctgggcaggcaactctcacggcccaagagtgcggagccaccccgttcaccactactcaagagggtgcagtcggctgagaaactggcagcagcacttgccgcctctgagaagaagctagccacttctcgcaagcacagccttgacctgccccactctgaactaaagaaggaactgccgcccagggaagtgagccctctggaggtagttggagccaggagtgtgctgtctggcaagggggccctgccagggaagggggtgctgcagcctgctccctcacgggccctaggcaccctccggcaggaccgagccgaacgacgggagtcgctgcagaagcaagaagccattcgtgaggtggactcctcagaggacgacaccgaggaagggcctgagaacagccagggtgcacaggagctgagcttggcacctcacccagaagtgagccagagtgtggcccctaaaggagcaggagagagtggggaagaggatcctttcccgtccagagaccctaggagcctgggcccaatggtcccaagcctattgacagggatcacactggggcctcccagaatggaaagtcccagtggtccccacaggaggctcgggagcccacaagccattgaggaggctgccagctcctcctcagcaggccccaacctaggtcagtctggagccacagaaccccatccctcctgaaggttgctggaangnccancacctccacacccnaggcactaanagcactttctcccagcacttcgggantcaccccancannagttgctctcctccnnctccncctctgggaaactgaacatgnggtnntggnaaatcccttatngagggcccaaaangggnttcccnannaaaaggnaancatggnagggggggctanccnacntncngatttggaaaaa

SEQ ID NO: 57 - DNA, 1062 bp, Homo Sapiens
  misc_feature (2)..(2): n is a, c, g, or t
  misc_feature (801)..(801): n is a, c, g, or t
  misc_feature (807)..(807): n is a, c, g, or t
  misc_feature (818)..(818): n is a, c, g, or t
  misc_feature (826)..(826): n is a, c, g, or t
  misc_feature (851)..(852): n is a, c, g, or t
  misc_feature (868)..(868): n is a, c, g, or t
  misc_feature (872)..(872): n is a, c, g, or t
  misc_feature (886)..(886): n is a, c, g, or t
  misc_feature (896)..(896): n is a, c, g, or t
  misc_feature (899)..(899): n is a, c, g, or t
  misc_feature (903)..(903): n is a, c, g, or t
  misc_feature (905)..(905): n is a, c, g, or t
  misc_feature (923)..(923): n is a, c, g, or t
  misc_feature (927)..(927): n is a, c, g, or t
  misc_feature (938)..(939): n is a, c, g, or t
  misc_feature (954)..(954): n is a, c, g, or t
  misc_feature (968)..(968): n is a, c, g, or t
  misc_feature (974)..(974): n is a, c, g, or t
  misc_feature (978)..(978): n is a, c, g, or t
  misc_feature (982)..(984): n is a, c, g, or t
  misc_feature (986)..(986): n is a, c, g, or t
  misc_feature (991)..(992): n is a, c, g, or t
  misc_feature (995)..(995): n is a, c, g, or t
  misc_feature (1001)..(1001): n is a, c, g, or t
  misc_feature (1006)..(1006): n is a, c, g, or t
  misc_feature (1017)..(1017): n is a, c, g, or t
  misc_feature (1026)..(1026): n is a, c, g, or t
  misc_feature (1034)..(1034): n is a, c, g, or t
  misc_feature (1036)..(1036): n is a, c, g, or t
  misc_feature (1044)..(1044): n is a, c, g, or t
  misc_feature (1047)..(1048): n is a, c, g, or t
  misc_feature (1058)..(1058): n is a, c, g, or t
cnaatagagagaattactatgagaggatcgcatcaccatcaccatcacggatcctatttaggtgacactatagaatcgtcgacccacgcgtccggctacttcttcttggacgacacggaccctgatagcatgaaggattttgagatcgtggaccagccgggcttggacatctttggacaggttttcaaccagtggaagagcaaggagtgtgtttgccccaattgcagtcgcagcattgccgcctcccgctttgctccccatctggagaagtgcctgggaatgggtcggaacagcagccgaatcgccaaccgccggattgccaatagcaacaatatgaataagtctgagagtgaccaagaagataatgatgacatcaatgacaacgactggtcctatggctcggagaagaaagccaagaagagaaagtcagacaagaaccccaattcccctcgaagatccaagtcattaaaacacaaaaatggggaacttagcaattcggatccttttaagtataacaattcaactgggatcagctatgagaccctggggccggaggagcttcgcagcctgctaaccacgcaatgtggggtgatttctgaacacaccaagaagatgtgcacaaggtccctgcgctgcccacagcacacagatgagcagaggcgaaccgtacggatttattttctcgggccctcggctgtccttccagaagtcgagagctccctggataatgacagctttgacatgactgacagccaggccctgatcagccggcttcagtgggacggctcctctgacctctcnccctcngaatcaggctncctccaanacgagtgaaaatcagggatggggtnnagggtacccacagctntgantcccggaaaccaanaaaaaaaatnccntctnancctggtagggaatgcccnccgnctaagtttcannaaaaaaaaaaaaccnaaagcccccggggncccccnaaancccnnnanttttnnatnaaatcnccttnacttgggggcnaagggaaancctttggntnaaaaaaanccnntttccctgancccc

SEQ ID NO: 58 - DNA, 997 bp, Homo Sapiens
  misc_feature (807)..(807): n is a, c, g, or t
  misc_feature (834)..(834): n is a, c, g, or t
  misc_feature (905)..(905): n is a, c, g, or t
  misc_feature (932)..(932): n is a, c, g, or t
  misc_feature (937)..(937): n is a, c, g, or t
  misc_feature (952)..(952): n is a, c, g, or t
  misc_feature (974)..(997): n is a, c, g, or t
aatagagaaattactatgagaggatcgcatcaccatcaccatcacggatcctatttaggtgacactatagaatcgtcgacccacgcgtccgccaagatggcggatgaagccacgcgacgtgttgtgtctgagatcccggtgctgaagactaacgccggaccccgagatcgtgagttgtgggtgcagcgactgaaggaggaatatcagtcccttatccggtatgtggagaacaacaagaatgctgacaacgattggttccgactggagtccaacaaggaaggaactcggtggtttggaaaatgctggtatatccatgacctcctgaaatatgagtttgacatcgagtttgacattcctatcacatatcctactactgccccagaaattgcagttcctgagctggatggaaagacagcaaagatgtacaggggtggcaaaatatgcctgacggatcatttcaaacctttgtgggccaggaatgtgcccaaatttggactagctcatctcatggctctggggctgggtccatggctggcagtggaaatccctgatctgattcagaagggcgtcatccaacacaaagagaaatgcaaccaatgaagaatcaagccactgaggcagggcagagggacctttgataggctacgatactattttcctgtgcatcacacttaactcatctaactgcttccccggacaccctccacctctagttgttactaagtagctgcagtaggcattgctggggaagaaacaaacacacaccaaacagtactgctacttagtttctaaggctgcacagggaanggaaagactgggctttggacaatctanaggtaatttatatccgcccccaggtggagcaacatgcgattctggaggcacggggggtaactgaaagtgantacatatagtctttctggtttctgganaaaancccatcaataaaaanctgcttcctctggtaaaaaaannnnnnnnnnnnnnnnnnnnnnnn

SEQ ID NO: 59 - DNA, 921 bp, Homo Sapiens
  misc_feature (2)..(2): n is a, c, g, or t
  misc_feature (713)..(713): n is a, c, g, or t
  misc_feature (718)..(718): n is a, c, g, or t
  misc_feature (752)..(752): n is a, c, g, or t
  misc_feature (764)..(764): n is a, c, g, or t
  misc_feature (769)..(769): n is a, c, g, or t
  misc_feature (776)..(776): n is a, c, g, or t
  misc_feature (779)..(779): n is a, c, g, or t
  misc_feature (789)..(789): n is a, c, g, or t
  misc_feature (802)..(802): n is a, c, g, or t
  misc_feature (806)..(806): n is a, c, g, or t
  misc_feature (814)..(814): n is a, c, g, or t
  misc_feature (821)..(821): n is a, c, g, or t
  misc_feature (825)..(825): n is a, c, g, or t
  misc_feature (828)..(828): n is a, c, g, or t
  misc_feature (831)..(831): n is a, c, g, or t
  misc_feature (835)..(835): n is a, c, g, or t
  misc_feature (838)..(838): n is a, c, g, or t
  misc_feature (842)..(842): n is a, c, g, or t
  misc_feature (847)..(847): n is a, c, g, or t
  misc_feature (858)..(858): n is a, c, g, or t
  misc_feature (860)..(860): n is a, c, g, or t
  misc_feature (865)..(865): n is a, c, g, or t
  misc_feature (878)..(879): n is a, c, g, or t
  misc_feature (884)..(884): n is a, c, g, or t
  misc_feature (886)..(886): n is a, c, g, or t
  misc_feature (897)..(898): n is a, c, g, or t
  misc_feature (907)..(907): n is a, c, g, or t
  misc_feature (910)..(910): n is a, c, g, or t
  misc_feature (917)..(917): n is a, c, g, or t
  misc_feature (919)..(919): n is a, c, g, or t
antagagaaattactatgagaggatcgcatcaccatcaccatcacggatcctatttaggtgacactatagaatcgtcgacccacgcgtccgctcctccagtgctgtgcgcatggcagtgggctgcctgctggagctggccttcaaggtggctgcaggagagctcaagaatggatttgccatcatccggcccccaggacaccacgccgaggaatccacagccatgggattctgcttcttcaactctgtagccatcaccgcaaaactcctacagcagaagttgaacgtgggcaaggtcctcatcgtggactgggacattcaccatggcaatggcacccagcaggcgttctacaatgacccctctgtgctctacatctctctgcatcgctatgacaacgggaacttctttccaggctctggggctcctgaagaggttggtggaggaccaggcgtggggtacaatgtgaacgtggcatggacaggaggtgtggacccccccattggagacgtggagtaccttacagccttcaggacagtggtgatgcccattgcccacgagttctcacctgatgtggtcctagtctccgccgggtttgatgctgttgaaggacatctgtctcctctgggtggctactctgtcaccgccagatgttttggccacttgaccaggcagctgatgaccctggcagggggccgggtggtgctggccctgganggagnccatgacttgaccgccatctgtgatgcctctgangcttgtgtctcnggctntgctcantgnaaaactgcancccttggaatgangcantcttgcancaaaaancccnaanatncacncantggnccacnctaaaaaaaantncttcnaaaattccaaaannaaaancntggaaacttgnntgcaaaaanttnccccccntngt

SEQ ID NO: 60 - DNA, 1018 bp, Homo Sapiens
  misc_feature (1)..(1): n is a, c, g, or t
  misc_feature (804)..(804): n is a, c, g, or t
  misc_feature (899)..(899): n is a, c, g, or t
  misc_feature (906)..(906): n is a, c, g, or t
  misc_feature (918)..(918): n is a, c, g, or t
  misc_feature (923)..(923): n is a, c, g, or t
  misc_feature (927)..(927): n is a, c, g, or t
  misc_feature (935)..(935): n is a, c, g, or t
  misc_feature (937)..(938): n is a, c, g, or t
  misc_feature (946)..(946): n is a, c, g, or t
  misc_feature (950)..(950): n is a, c, g, or t
  misc_feature (960)..(960): n is a, c, g, or t
  misc_feature (965)..(965): n is a, c, g, or t
  misc_feature (972)..(973): n is a, c, g, or t
  misc_feature (976)..(976): n is a, c, g, or t
  misc_feature (999)..(999): n is a, c, g, or t
  misc_feature (1002)..(1002): n is a, c, g, or t
  misc_feature (1007)..(1007): n is a, c, g, or t
  misc_feature (1009)..(1009): n is a, c, g, or t
  misc_feature (1013)..(1014): n is a, c, g, or t
  misc_feature (1016)..(1016): n is a, c, g, or t
naaatagagaaattactatgagaggatcgcatcaccatcaccatcacggatcctatttaggtgacactatagaatcgtcgacccacgcgtccggtgaagcagagcttcctgaccgaggtggagcagctgtccaggtttcgtcacccaaacattgtggactttgctggctactgtgctcagaacggcttctactgcctggtgtacggcttcctgcccaacggctccctggaggaccgtctccactgccagacccaggcctgcccacctctctcctggcctcagcgactggacatccttctgggtacagcccgggcaattcagtttctacatcaggacagccccagcctcatccatggagacatcaagagttccaacgtccttctggatgagaggctgacacccaagctgggagactttggcctggcccggttcagccgctttgccgggtccagccccagccagagcagcatggtggcccggacacagacagtgcggggcaccctggcctacctgcccgaggagtacatcaagacgggaaggctggctgtggacacggacaccttcagctttggggtggtagtgctagagaccttggctggtcagagggctgtgaagacgcacggtgccaggaccaagtatctgaaagacctggtggaagaggaggctgaggaggctggagtggctttgagaagcacccagagcacactgcaagcaggtctggctgcagatgcctgggctgctcccatcgccatgcagatctacaagaagcacctggaccccaggcccgggccctgcccacctganctgggcctgggcctgggccactggcctgctgctgcctgcaccgccgggccaaaaggaggcctcctatgacccaaggaaaactcctacgtgtccancactggnaaaacccacagnggggntgcntccatggnanncccctggnaacnccatcagganccagngcccaannaancaaaaaactgcaaaaagccccancancccgngnaaannanaa

SEQ ID NO: 61 - DNA, 1136 bp, Homo Sapiens
  misc_feature (2)..(2): n is a, c, g, or t
  misc_feature (929)..(929): n is a, c, g, or t
  misc_feature (941)..(941): n is a, c, g, or t
  misc_feature (954)..(954): n is a, c, g, or t
  misc_feature (959)..(959): n is a, c, g, or t
  misc_feature (964)..(964): n is a, c, g, or t
  misc_feature (966)..(966): n is a, c, g, or t
  misc_feature (968)..(968): n is a, c, g, or t
  misc_feature (971)..(971): n is a, c, g, or t
  misc_feature (987)..(987): n is a, c, g, or t
  misc_feature (1002)..(1002): n is a, c, g, or t
  misc_feature (1024)..(1024): n is a, c, g, or t
  misc_feature (1026)..(1028): n is a, c, g, or t
  misc_feature (1050)..(1050): n is a, c, g, or t
  misc_feature (1054)..(1054): n is a, c, g, or t
  misc_feature (1058)..(1058): n is a, c, g, or t
  misc_feature (1060)..(1060): n is a, c, g, or t
  misc_feature (1074)..(1074): n is a, c, g, or t
  misc_feature (1085)..(1085): n is a, c, g, or t
  misc_feature (1096)..(1096): n is a, c, g, or t
  misc_feature (1101)..(1101): n is a, c, g, or t
  misc_feature (1110)..(1110): n is a, c, g, or t
  misc_feature (1113)..(1113): n is a, c, g, or t
  misc_feature (1116)..(1116): n is a, c, g, or t
  misc_feature (1120)..(1120): n is a, c, g, or t
  misc_feature (1125)..(1125): n is a, c, g, or t
  misc_feature (1128)..(1129): n is a, c, g, or t
  misc_feature (1131)..(1131): n is a, c, g, or t
  misc_feature (1136)..(1136): n is a, c, g, or t
antagagaaattactatgagaggatcgcatcaccatcaccatcacggatcctatttaggtgacactatagaatcgtcgacccacgcgtccgtgggttctcccgattatggcaactcagccctgctcagcttgcctggctaccgccccaccactcgcagttctgctcgtcgttcccaggccggggtgtccagtggggcccctccaggaaggaacagcttctacatgggcacttgccaggatgagcctgagcagctggatgactggaaccgcattgcagagctgcagcagcgcaatcgagtgtgccccccacatctgaagacctgctatcccctggagtccaggccttccctgagcctgggcaccatcacagatgaggagatgaaaactggagacccccaagagaccctgcgccgagccagcatgcagccaatccagatagccgagggcactggcatcaccacccggcagcagcgcaaacgggtctccctagagccccaccagggccctggaactcctgagtctaagaaggccaccagctgtttcccacgccccatgactccccgagaccgacatgaagggcgcaaacagagcactactgaggcccagaagaaagcagctccagcttctactaaacaggctgaccggcgccagtcgatggccttcagcatcctcaacacacccaagaagctagggaacagccttctgcggcggggagcctcaaagaaggccctgtccaaggcttcccccaacactcgcagtggaacccgccgttctccgcgcattgccaccaccacagccagcgccgccactgctgccgccattggtgccacccctcgagccaagggcaaggcaaaagcactaaagggccagtaccagtgagtggccccacctgtgtccccgatgctgccgtcacctggtcctccgcctantgtccctctcantgccttctctcanctccnagccnanantanccaaacccctaaaaanagtgatgcctgcccncaccctggcctggtcctggtcntnnntgggccttttcgaactggccangggnctgnanatgaaaggggggcnctctcctactngcccctttttntaaanaaatccttntcntcnaacnaattnagnngntttan

SEQ ID NO: 62 - DNA, 794 bp, Homo Sapiens
  misc_feature (222)..(222): n is a, c, g, or t
  misc_feature (365)..(365): n is a, c, g, or t
  misc_feature (461)..(461): n is a, c, g, or t
  misc_feature (466)..(466): n is a, c, g, or t
  misc_feature (472)..(472): n is a, c, g, or t
  misc_feature (548)..(548): n is a, c, g, or t
  misc_feature (568)..(568): n is a, c, g, or t
  misc_feature (571)..(571): n is a, c, g, or t
  misc_feature (581)..(581): n is a, c, g, or t
  misc_feature (585)..(585): n is a, c, g, or t
  misc_feature (590)..(590): n is a, c, g, or t
  misc_feature (605)..(605): n is a, c, g, or t
  misc_feature (612)..(612): n is a, c, g, or t
  misc_feature (618)..(619): n is a, c, g, or t
  misc_feature (628)..(628): n is a, c, g, or t
  misc_feature (635)..(635): n is a, c, g, or t
  misc_feature (640)..(640): n is a, c, g, or t
  misc_feature (650)..(651): n is a, c, g, or t
  misc_feature (657)..(657): n is a, c, g, or t
  misc_feature (660)..(660): n is a, c, g, or t
  misc_feature (665)..(665): n is a, c, g, or t
  misc_feature (669)..(671): n is a, c, g, or t
  misc_feature (678)..(678): n is a, c, g, or t
  misc_feature (691)..(691): n is a, c, g, or t
  misc_feature (708)..(708): n is a, c, g, or t
  misc_feature (727)..(727): n is a, c, g, or t
  misc_feature (730)..(730): n is a, c, g, or t
  misc_feature (744)..(744): n is a, c, g, or t
  misc_feature (750)..(750): n is a, c, g, or t
  misc_feature (754)..(754): n is a, c, g, or t
  misc_feature (763)..(763): n is a, c, g, or t
  misc_feature (769)..(769): n is a, c, g, or t
  misc_feature (773)..(773): n is a, c, g, or t
  misc_feature (777)..(777): n is a, c, g, or t
  misc_feature (790)..(791): n is a, c, g, or t
  misc_feature (794)..(794): n is a, c, g, or t
aatagagaaattactatgagaggatcgcatcaccatcaccatcacggatcctatttaggtgacactatagaatcgtcgacccacgcgtccgggttgagctgctgccgccgccgcctctgtcgtcgtcgcgagtgtggagtcgggactggagctgctgccgcggcgacgccggggatctttgtcgctagctcccggcccttctgccccgccgccttccctcantcagcgttgcccactcctctccggccgggcgcccctgcctccatttctcgctctctgtccaccacacacacggcccccccgatcatggatccgggcagtggcggcggcggcggcggcggcggcggcggcggcgggagcagcancggcagcagcagcagcgactcggcgcctgactgctgggaccaggcggacatggaagcccccgggccgggcccttgcggcggcggcggctccctggnggcgncggccnaggcccagcgggagaacctcagcgcggccttcatccggcaactcaacgtcaacgccaagcccttcgtgcccaacgnccacgccgccgagttcgtgncgnccttcctgcngtgnccggnagcgccgccaccccnagctggnggcacnnccaataacnaacgganccggnatcggcgcgnnaagccntgngacanctgnnnaatcctntcaagaggaatantcattgtgtgaaggttnaaatttcaactgttaaacntgnaacttttcaaaaanctattntaanaaaatgganaaacanaaantgtnttccaaaataatnntgn

SEQ ID NO: 63 - DNA, 947 bp, Homo Sapiens
  misc_feature (635)..(635): n is a, c, g, or t
  misc_feature (716)..(716): n is a, c, g, or t
  misc_feature (719)..(719): n is a, c, g, or t
  misc_feature (746)..(746): n is a, c, g, or t
  misc_feature (782)..(782): n is a, c, g, or t
  misc_feature (792)..(792): n is a, c, g, or t
  misc_feature (805)..(805): n is a, c, g, or t
  misc_feature (818)..(819): n is a, c, g, or t
  misc_feature (826)..(826): n is a, c, g, or t
  misc_feature (865)..(866): n is a, c, g, or t
  misc_feature (870)..(870): n is a, c, g, or t
  misc_feature (875)..(875): n is a, c, g, or t
  misc_feature (879)..(879): n is a, c, g, or t
  misc_feature (887)..(887): n is a, c, g, or t
  misc_feature (893)..(893): n is a, c, g, or t
  misc_feature (904)..(904): n is a, c, g, or t
  misc_feature (914)..(914): n is a, c, g, or t
  misc_feature (918)..(918): n is a, c, g, or t
  misc_feature (920)..(920): n is a, c, g, or t
  misc_feature (922)..(922): n is a, c, g, or t
  misc_feature (928)..(929): n is a, c, g, or t
  misc_feature (937)..(937): n is a, c, g, or t
  misc_feature (942)..(944): n is a, c, g, or t
tagagagattactatgagaggatcgcatcaccatcaccatcacggatcctatttaggtgacactatagaatcgtcgacccacgcgtccgagttcaagcagctggctctggaggacgccaaagaaggctacagatatggtttggagtgcctttttcgatactacagttatggcctggaaaagaagttccggctggacatattcaaggattttcaggaggaaacggtgaaggactatgaagctggccaactgtatgggctggagaagttctgggccttcttgaaatattccaaagccaaaaatttggacattgaccccaaactgcaagaatacctcggcaaattccgacgtcttgaagacttccgagtagatccccccatgggtgaggagggcaaccacaagcgacactcagtggtagcaggaggtggcggcggtgagggcaggaagcggtgcccctcccagtcttccagcaggcctgctgccatgatcagccaaccccctacaccacccaccggccagcctgtccgggaagatgccaaatggacaagccagcactcgaacacacagactttgggaaagtgaaaagctccttagcccctggggcttgaggggggaaaggggtagggtggggtaagantccatggggggtgcccagtcccaggagaggggacaatgaagggacaggcctggagttactaggacaggcctttgtgctgantancaatgtatacaccatttgggctatcanaagtacccctggggcaggaacctctaaatccccttnccccctcctntttccatgaattnttgaaatcctaannttctttntaagggggggaagggaaaagggggggaagatttttttanntttntttancctntttatatnttccangtttttaaaantattggaaanttcncncngggaannaccaaaanccccnnncaa

SEQ ID NO: 64 - DNA, 1184 bp, Homo Sapiens
  misc_feature (879)..(879): n is a, c, g, or t
  misc_feature (882)..(882): n is a, c, g, or t
  misc_feature (896)..(896): n is a, c, g, or t
  misc_feature (957)..(957): n is a, c, g, or t
  misc_feature (974)..(974): n is a, c, g, or t
  misc_feature (1018)..(1018): n is a, c, g, or t
  misc_feature (1034)..(1034): n is a, c, g, or t
  misc_feature (1040)..(1040): n is a, c, g, or t
  misc_feature (1062)..(1062): n is a, c, g, or t
  misc_feature (1088)..(1088): n is a, c, g, or t
  misc_feature (1096)..(1096): n is a, c, g, or t
  misc_feature (1104)..(1104): n is a, c, g, or t
  misc_feature (1106)..(1106): n is a, c, g, or t
  misc_feature (1126)..(1127): n is a, c, g, or t
  misc_feature (1130)..(1130): n is a, c, g, or t
  misc_feature (1132)..(1134): n is a, c, g, or t
  misc_feature (1166)..(1166): n is a, c, g, or t
  misc_feature (1169)..(1169): n is a, c, g, or t
  misc_feature (1174)..(1174): n is a, c, g, or t
  misc_feature (1177)..(1177): n is a, c, g, or t
  misc_feature (1179)..(1179): n is a, c, g, or t
  misc_feature (1181)..(1181): n is a, c, g, or t
gagaaattactatgagaggatcgcatcaccatcaccatcacggatcctatttaggtgacactatagaatcgtcgacccacgcgtccgccatggctgagctgcagcagctccgggtgcaggaggcggtggagtccatggtgaagagtctggaaagagagaacatccggaagatgcagggtctcatgttccggtgcagcgccagctgttgtgaggacagccaggcctccatgaagcaggtgcaccagtgcatcgagcgctgccatgtgcctctggctcaagcccaggctttggtcaccagtgagctggagaagttccaggaccgcctggcccggtgcaccatgcattgcaatgacaaagccaaagattcaatagatgctgggagtaaggagcttcaggtgaagcagcagctggacagttgtgtgaccaagtgtgtggatgaccacatgcacctcatcccaactatgaccaagaagatgaaggaggctctcttatcaattggaaaataaaagtatttgccagtggccatcagggctgagggcaagaatatattttttataaggaattgggaattttagtcttttaagcaaagtttacgaatgaagaaatgaaggatggccacaagcgtaaggcatatgtcacttgcctctggacactggttattttatgtttcagtccctaaaaaatgaaatggaaaaaagtggtgctaaatcgagtcagagatattacaggagagttttagagcttattatttcctgtggccagtgcttgtcctggcagtaaggctctcccctgtaacaagccagagccctccaaggtaccagactcttcttactacacaggtactaacaggctggcaggttaaagttggtggagtctganganagatatttttctcntttgttgccaacatcctgtttaccaaaagtgtcaccccaccatcttccataagctgtgaancaaaatcaatgaggtcnctaacttaaaagggaaaaaaagttttctgggtctttgttttctngatttgggggtaattnatacanggcatacaagttgattttaaangtggaactggggaggtaaactaattngaaaaaanctttgaangntccttgggaatccccatttnnggncnnnaaaaggggaaggacattttttaaaaatataanagngggcnccntncnccc

SEQ ID NO: 65 - DNA, 1116 bp, Homo Sapiens
  misc_feature (826)..(826): n is a, c, g, or t
  misc_feature (840)..(840): n is a, c, g, or t
  misc_feature (845)..(845): n is a, c, g, or t
  misc_feature (875)..(875): n is a, c, g, or t
  misc_feature (886)..(886): n is a, c, g, or t
  misc_feature (904)..(904): n is a, c, g, or t
  misc_feature (907)..(907): n is a, c, g, or t
  misc_feature (945)..(945): n is a, c, g, or t
  misc_feature (947)..(947): n is a, c, g, or t
  misc_feature (1004)..(1005): n is a, c, g, or t
  misc_feature (1008)..(1008): n is a, c, g, or t
  misc_feature (1015)..(1015): n is a, c, g, or t
  misc_feature (1017)..(1017): n is a, c, g, or t
  misc_feature (1034)..(1035): n is a, c, g, or t
  misc_feature (1039)..(1039): n is a, c, g, or t
  misc_feature (1045)..(1045): n is a, c, g, or t
  misc_feature (1056)..(1056): n is a, c, g, or t
  misc_feature (1061)..(1061): n is a, c, g, or t
  misc_feature (1073)..(1073): n is a, c, g, or t
  misc_feature (1079)..(1080): n is a, c, g, or t
  misc_feature (1097)..(1097): n is a, c, g, or t
  misc_feature (1101)..(1105): n is a, c, g, or t
  misc_feature (1109)..(1109): n is a, c, g, or t
  misc_feature (1111)..(1112): n is a, c, g, or t
  misc_feature (1115)..(1115): n is a, c, g, or t
aggaaattaactatgagaggatcgcatcaccattcaccatcacggatcctatttaggtgacactatagaatcgtcgacccacgcgtccgggccagccccttgtcctctgccttctgctggcagaggagcagctggactggggccttttggcacagcagccggtgtctcctgcgcccgcctcccccatggccccatgcagccccaggggcttcccccctgcccatggagtagagcccgagatcctggccactatgccagttctgacctcgcatccccctaccccgagcccatgcagtctgggaacatgccgccttctctccagcctctgtgcctttgttccaggtggtctcaccctcctgtccctggctgggctaggtggtcctgtccaggctcctgcagcgcccccctcactttgacactggactaggatgcagcctcccttctgtgtccccttgagggtaccctgggtcccctcatcaggggcagaggcatgaaagagtcggggctggatggccaggggcttctgggcccgacgcctagtgcagcccctggggtcgtggtttgacatttgtctgcctggtgcaaacaaggaatccttgcctttaaggtgacaggccctccacaggcttccagacttgaaggaaaaggtttaagaaagaaaacaaaaccaacagttagtggagtcaaagcccagacactgtaaatagaaccccctccaccaccccccgccgcccagcatcctacctggactgcggtgctacgagggcctgcgggccttttgctgtgtgccaaccctccctgtaagtctatttaaaaaacatcgacnaaacattgaaaatntgtgnaacgtttttgaaaaagctacagcttccaancaaccaaaaancaaactgtttgttttggnaanaacggtcctgatgtaaaaaccttgaattgaaaattcantngctcaccttgaaaacgttaattcaaaaacccaaaggaaatggctggtccccatcccnnatntgggctngngtggaacctcaaccttnntttntgtggnaaattttaatnaaaanttggtccccccnaaaatnnaacaaaaaaaaaaaaanaaannnnnaaanannaana

SEQ ID NO: 66 - DNA, 1177 bp, Homo Sapiens
  misc_feature (808)..(808): n is a, c, g, or t
  misc_feature (827)..(827): n is a, c, g, or t
  misc_feature (852)..(852): n is a, c, g, or t
  misc_feature (869)..(869): n is a, c, g, or t
  misc_feature (884)..(884): n is a, c, g, or t
  misc_feature (891)..(891): n is a, c, g, or t
  misc_feature (897)..(897): n is a, c, g, or t
  misc_feature (901)..(901): n is a, c, g, or t
  misc_feature (921)..(921): n is a, c, g, or t
  misc_feature (923)..(923): n is a, c, g, or t
  misc_feature (929)..(930): n is a, c, g, or t
  misc_feature (955)..(955): n is a, c, g, or t
  misc_feature (964)..(964): n is a, c, g, or t
  misc_feature (975)..(975): n is a, c, g, or t
  misc_feature (988)..(988): n is a, c, g, or t
  misc_feature (994)..(994): n is a, c, g, or t
  misc_feature (1000)..(1001): n is a, c, g, or t
  misc_feature (1003)..(1003): n is a, c, g, or t
  misc_feature (1016)..(1016): n is a, c, g, or t
  misc_feature (1026)..(1026): n is a, c, g, or t
  misc_feature (1028)..(1028): n is a, c, g, or t
  misc_feature (1032)..(1032): n is a, c, g, or t
  misc_feature (1034)..(1034): n is a, c, g, or t
  misc_feature (1040)..(1040): n is a, c, g, or t
  misc_feature (1049)..(1049): n is a, c, g, or t
  misc_feature (1072)..(1072): n is a, c, g, or t
  misc_feature (1110)..(1110): n is a, c, g, or t
  misc_feature (1115)..(1115): n is a, c, g, or t
  misc_feature (1119)..(1119): n is a, c, g, or t
  misc_feature (1131)..(1131): n is a, c, g, or t
  misc_feature (1164)..(1164): n is a, c, g, or t
  misc_feature (1167)..(1168): n is a, c, g, or t
  misc_feature (1170)..(1171): n is a, c, g, or t
  misc_feature (1173)..(1176): n is a, c, g, or t
tagagaaattactatgagaggatcgcatcaccatcaccatcacggatcctatttaggtgacactatagaatcgtcgacccacgcgtccggcaaaaaagatctgacagagtacttgtctcgatttggggaagttgtagactgcacaattaaaacagatccagtcactgggagatcaagaggatttggatttgtgcttttcaaagatgctgctagtgttgataaggttttggaactgaaagaacacaaactggatggcaaattgatagatcccaaaagggccaaagctttaaaagggaaagaacctcccaaaaaggtttttgtgggtggattgagcccggatacttctgaagaacaaattaaagaatattttggagcctttggagagattgaaaatattgaacttcccatggatacaaaaacaaatgaaagaagaggattttgttttatcacatatactgatgaagagccagtaaaaaaattgttagaaagcagataccatcaaattggttctgggaagtgtgaaatcaaagttgcacaacccaaagaggtatataggcagcaacagcaacaacaaaaaggtggaagaggtgctgcagctggtggacgaggtggtacgaggggtcgtggccgaggtcagggccaaaactggaaccaaggatttaataactattatgatcaaggatatggaaattacaatagtgcctatggtggtgatcaaaactatagtggctatggcggatatgattatactgggtataactatgggaactatggatatggacagggatatgcagactacagtggccancagagcacttatggcaagncatctcgagggggtggcaatcaccnaaaacaattaccagccntactaaaggaaaacnttggaanaaaacngggnggagatgttaaagtaacccntncttgcnngacgaccttgaaaaattggccctcnggtgaatcnaagaggaatanttttgtaaaaaanctttcntagggnncnaaaccccctttgnggcccactgntnaaancngcccantaagtttcnttggttttaccttggcccttgcnaacccggggtaagacccaaggggaattggttaaacccnttttnttgnaccattcccggnaaacccccaaaaaagccttcccttttgggaaanaannannannnna

SEQ ID NO: 67 - DNA, 1318 bp, Homo Sapiens
  misc_feature (856)..(856): n is a, c, g, or t
  misc_feature (862)..(862): n is a, c, g, or t
  misc_feature (891)..(891): n is a, c, g, or t
  misc_feature (899)..(899): n is a, c, g, or t
  misc_feature (934)..(934): n is a, c, g, or t
  misc_feature (980)..(980): n is a, c, g, or t
  misc_feature (1007)..(1007): n is a, c, g, or t
  misc_feature (1009)..(1009): n is a, c, g, or t
  misc_feature (1015)..(1015): n is a, c, g, or t
  misc_feature (1022)..(1022): n is a, c, g, or t
  misc_feature (1026)..(1026): n is a, c, g, or t
  misc_feature (1035)..(1035): n is a, c, g, or t
  misc_feature (1037)..(1037): n is a, c, g, or t
  misc_feature (1058)..(1058): n is a, c, g, or t
  misc_feature (1080)..(1080): n is a, c, g, or t
  misc_feature (1086)..(1086): n is a, c, g, or t
  misc_feature (1091)..(1091): n is a, c, g, or t
  misc_feature (1095)..(1095): n is a, c, g, or t
  misc_feature (1112)..(1112): n is a, c, g, or t
  misc_feature (1117)..(1117): n is a, c, g, or t
  misc_feature (1138)..(1139): n is a, c, g, or t
  misc_feature (1142)..(1143): n is a, c, g, or t
  misc_feature (1146)..(1146): n is a, c, g, or t
  misc_feature (1152)..(1152): n is a, c, g, or t
  misc_feature (1158)..(1158): n is a, c, g, or t
  misc_feature (1164)..(1164): n is a, c, g, or t
  misc_feature (1171)..(1172): n is a, c, g, or t
  misc_feature (1175)..(1175): n is a, c, g, or t
  misc_feature (1180)..(1181): n is a, c, g, or t
  misc_feature (1187)..(1187): n is a, c, g, or t
  misc_feature (1201)..(1201): n is a, c, g, or t
  misc_feature (1213)..(1213): n is a, c, g, or t
  misc_feature (1222)..(1222): n is a, c, g, or t
  misc_feature (1226)..(1227): n is a, c, g, or t
  misc_feature (1233)..(1233): n is a, c, g, or t
  misc_feature (1246)..(1246): n is a, c, g, or t
  misc_feature (1248)..(1248): n is a, c, g, or t
  misc_feature (1257)..(1258): n is a, c, g, or t
  misc_feature (1261)..(1261): n is a, c, g, or t
  misc_feature (1265)..(1265): n is a, c, g, or t
  misc_feature (1284)..(1284): n is a, c, g, or t
  misc_feature (1299)..(1299): n is a, c, g, or t
  misc_feature (1305)..(1305): n is a, c, g, or t
  misc_feature (1312)..(1312): n is a, c, g, or t
tagagaaaattactatgagaggatcgcatcaccatcaccatcacggatcctatttaggtgacactatagaatcgtcgacccacgcgtccgcaggatattactatgatccgacaacagggctctattatgaccccaactcgcaatactactataattccttgacccagcagtacctttactgggatggggaaaaagagacctacgtgccagctgcagagtctagctcccaccagcagtcgggcctgcctcctgcaaaagaggggaaagagaagaaggagaaacccaagagcaaaacagcccagcagattgccaaagacatggaacgctgggctaagagtttgaataagcagaaagaaaactttaaaaatagctttcagcctgtcaattccttgagggaagaagaaaggagagaatctgctgcagcagacgctggctttgctctctttgagaagaagggagccttagctgaaaggcagcagctcatcccagaattggtgcgaaatggagatgaggagaatcccctcaaaaggggtctggttgctgcttacagtggtgacagtgacaatgaggaggagctggtggagagacttgagagtgaggaagagaagctagctgactggaagaagatggcctgtctgctctgccggcgccagttcccgaacaaagatgccctagtcaggcaccagcaactctcagaccttcacaagcaaaacatggacatctatcgacgatccaggctgagcgagcaggagctggaagccttggagctaagggagagagagatgaaataccgagaccgagctgcagaaagacgggagaagtacggcattccagaacctccagagccaagcgcaanaagcantttgatgccggcactgtgaattacgagcnaccccccnaagatggcattgaccacagtaacattggcaacaanatgctgcaggccatggggctgggcgggaaggctctggcttgggacnaaagtgtcaaggcattacggcttcccntngaggcncaagttncggntaaagggancnggccctaggaacccaaggcanccccaaatggtttggccgggcnccaatncttanaaanattgctgttccggaaanccctnttttgcccggttccttgaaannggnntgnaaaaanaaaaanaaaaanaattccnnggnccccnnaagggnccctcccccaaatnccgtttcccccntttctttangggnngccttnggggtttaaaatntnagggaaacnnttntttngggggtttccccccccctnaaaaattccccttgnggggtncgggggnggcccc

SEQ ID NO: 68 - DNA, 928 bp, Homo Sapiens
  misc_feature (799)..(799): n is a, c, g, or t
  misc_feature (801)..(801): n is a, c, g, or t
  misc_feature (821)..(821): n is a, c, g, or t
  misc_feature (844)..(844): n is a, c, g, or t
  misc_feature (847)..(847): n is a, c, g, or t
  misc_feature (851)..(851): n is a, c, g, or t
  misc_feature (868)..(869): n is a, c, g, or t
  misc_feature (872)..(872): n is a, c, g, or t
  misc_feature (883)..(883): n is a, c, g, or t
  misc_feature (891)..(891): n is a, c, g, or t
  misc_feature (901)..(903): n is a, c, g, or t
  misc_feature (909)..(909): n is a, c, g, or t
  misc_feature (911)..(911): n is a, c, g, or t
  misc_feature (916)..(916): n is a, c, g, or t
  misc_feature (918)..(918): n is a, c, g, or t
  misc_feature (921)..(922): n is a, c, g, or t
tagagaaattactatgagaggatcgcatcaccatcaccatcacggatcctatttaggtgacactatagaatcgtcgacccacgcgtccgcgcgcacacgcacacgggcacacacgcgcgcacgggatcctgctccgctccgcggctcccccgccccggagagctccgcgatcagcacccgggacagcgccaccgcccacgtgcagggggtggggtccgggcggggctggcgcctcggcgtctcccgggagtgtcccgtccagccgccgagcagggtgcttgagtgtctctgcagaaaagactccaggaccccgccaccatgttcccggagcccccaaccccggggcctccatcgcccgacacgcctcccgactccagtcgcatcagccacggcccagtgcccccctgggccctggccaccatcgtgctggtctcaggcctcctcatcttcagctgctgtttctgtctctaccggaagagctgtcggaggcggacaggcaagaagagccaggcccaagcccaggtccaccttcaggaagtgaaggggctgggccagagttacatagacaaggtgcagccagaagtagaggagctggagccagcaccatccgggccagggcagcaggtggcagacaagcatgagctaggacgactgcagtactccctggattatgacttccagagtggccagctgctggtgggcattctgcaagcaatgggattggcagccttggatcttggtggctcctcggacccctatgtgcgggtctacctgctgccggacaaacggaggcggtacnanaccaaggtgcatcggcagangctgaaccctcactttggggaanacnttcnccttcaaggtcccctanntgnaactggggggnaagggtgntggtcatggnnntgtaanantttcnancgnnttctct

SEQ ID NO: 69 - DNA, 952 bp, Homo Sapiens
  misc_feature (627)..(627): n is a, c, g, or t
  misc_feature (670)..(670): n is a, c, g, or t
  misc_feature (683)..(683): n is a, c, g, or t
  misc_feature (710)..(710): n is a, c, g, or t
  misc_feature (726)..(727): n is a, c, g, or t
  misc_feature (738)..(738): n is a, c, g, or t
  misc_feature (741)..(741): n is a, c, g, or t
  misc_feature (759)..(759): n is a, c, g, or t
  misc_feature (783)..(783): n is a, c, g, or t
  misc_feature (789)..(789): n is a, c, g, or t
  misc_feature (795)..(795): n is a, c, g, or t
  misc_feature (819)..(819): n is a, c, g, or t
  misc_feature (829)..(829): n is a, c, g, or t
  misc_feature (832)..(832): n is a, c, g, or t
  misc_feature (850)..(850): n is a, c, g, or t
  misc_feature (869)..(869): n is a, c, g, or t
  misc_feature (873)..(873): n is a, c, g, or t
  misc_feature (889)..(889): n is a, c, g, or t
  misc_feature (891)..(891): n is a, c, g, or t
  misc_feature (900)..(900): n is a, c, g, or t
  misc_feature (910)..(911): n is a, c, g, or t
  misc_feature (913)..(913): n is a, c, g, or t
  misc_feature (917)..(917): n is a, c, g, or t
  misc_feature (920)..(920): n is a, c, g, or t
  misc_feature (924)..(925): n is a, c, g, or t
  misc_feature (941)..(941): n is a, c, g, or t
  misc_feature (946)..(947): n is a, c, g, or t
gaatagagaaattactatgagaggatcgcatcaccatcaccatcacgggatcctatttaggtgacactatagaatcgtcgacccacgcgtccgcccacgcgtccgccatgccagatgaccttctgaccacgttggatgacacttgtgatctctttgcccccctagtccaggagactaataagcagcccccccagacggtgaacccaattggccatctcccagaaagtttaacaaaacccgaccaggttgcccccttcaccttcttacaacctcttcccctttccccaggggtcctgtcctccactccagatcattcctttagtttagagctgggcagtgaagtggatatcactgaaggagataggaagccagactacactgcttacgttgccatgatccctcagtgcataaaggaggaagacaccccttcagataatgatagtggcatctgtatgagcccagagtcctatctggggtctcctcagcacagcccctctaccaggggctctccaaataggagcctcccatctccaggtgttctctgtgggtctgcccgtcccaaaccttacgatcctcctggagagaagatggtagcagcaaaagtaaagggtgagaaactggataaanaagctgaaaaaaaatggagcaaaaacaagacagcagccactangtaccgccagaanaaaaagggcggaacaagaaggctcttnactgggtgagtgcaannagctggaaaanaanaacgaggctctaaaaaanagggcggattccctggccaagganatccantacctngaaaaaattttgaaaaaaaaaggnccccaagggnaanggggggaaaaaaaggggncccccaaatttaaggaaantcanggaacggtcaaatggngntttgtaaanaaaaaagggnntngaanttngtgnntttccaaaaaaattanttttnnaaggg

SEQ ID NO: 70 - DNA, 1080 bp, Homo Sapiens
  misc_feature (936)..(936): n is a, c, g, or t
  misc_feature (965)..(965): n is a, c, g, or t
  misc_feature (967)..(968): n is a, c, g, or t
  misc_feature (991)..(991): n is a, c, g, or t
  misc_feature (1029)..(1029): n is a, c, g, or t
  misc_feature (1031)..(1031): n is a, c, g, or t
  misc_feature (1034)..(1034): n is a, c, g, or t
  misc_feature (1045)..(1045): n is a, c, g, or t
  misc_feature (1047)..(1047): n is a, c, g, or t
  misc_feature (1049)..(1049): n is a, c, g, or t
  misc_feature (1053)..(1053): n is a, c, g, or t
atagagagattactatgagaggatcgcatcaccatcaccatcacggatcctatttaggtgacactatagaatcgtcgacccacgcgtccgagcgggggaagatggcggcggccgttccacagcgggcgtggaccgtggagcagctgcgcagtgagcagctgcccaagaaggacattatcaagtttctgcaggaacacggttcagattcgtttcttgcagaacataaattattaggaaacattaaaaatgtggccaagacagctaacaaggaccacttggttacagcctataaccatctttttgaaactaagcgttttaagggtactgaaagtataagtaaagtgtctgagcaagtaaaaaatgtgaagcttaatgaagataaacccaaagaaaccaagtctgaagagaccctggatgagggtccaccaaaatatactaaatctgttctgaaaaagggagataaaaccaactttcccaaaaagggagatgttgttcactgctggtatacaggaacactacaagatgggactgtttttgatactaatattcaaacaagtgcaaagaagaagaaaaatgccaagcctttaagttttaaggtcggagtaggcaaagttatcagaggatgggatgaagctctcttgactatgagtaaaggagaaaaggctcgactggagattgaaccagaatgggcttacggaaagaaaggacagcctgatgccaaaattccaccaaatgcaaaactcacttttgaagtggaattagtggatattgattgaaaatagcagtgcttcagctctaaggatattagcaacaatgataaaacttggccttgaagaatttacacaactagttagaacttgttactattgtaagggaagagtcaactggaaaattcaaggagttaataaaatttgtttacttggtccccaccttttngagaaaaaaatcccttatgaatccccggncnnaaatacttttcctacagctgtgntaaatactggtccaggaaaaactttttcccttttaccncntgntggaaaacttnangnggcnccaataaaaattgatccccctgtcttg

SEQ ID NO: 71 - DNA, 860 bp, Homo Sapiens
  misc_feature (730)..(730): n is a, c, g, or t
  misc_feature (747)..(747): n is a, c, g, or t
  misc_feature (751)..(751): n is a, c, g, or t
  misc_feature (754)..(754): n is a, c, g, or t
  misc_feature (758)..(758): n is a, c, g, or t
  misc_feature (761)..(761): n is a, c, g, or t
  misc_feature (764)..(764): n is a, c, g, or t
  misc_feature (778)..(778): n is a, c, g, or t
  misc_feature (783)..(783): n is a, c, g, or t
  misc_feature (787)..(787): n is a, c, g, or t
  misc_feature (794)..(794): n is a, c, g, or t
  misc_feature (802)..(802): n is a, c, g, or t
  misc_feature (805)..(805): n is a, c, g, or t
  misc_feature (835)..(835): n is a, c, g, or t
  misc_feature (837)..(837): n is a, c, g, or t
  misc_feature (845)..(845): n is a, c, g, or t
  misc_feature (848)..(850): n is a, c, g, or t
  misc_feature (859)..(859): n is a, c, g, or t
tagagaaattactatggagaggatcgcatcaccattcaccatcacggatcctatttaggtgacactatagaatcgtcgacccacgcgtccgcccacgcgtccgagcaccgccccctggacgagcgggccctgcaggagaagctgaagtactttcccgtgtgcgtgagcaccaagccggagcccgaggacgatgcagaagagggacttgggggtcttcccagcaacatcagctctgtcagctccttgctgctcttcaacaccactgagaacctgtacaagaagtatgtcttcctggaccccctggctggtgctgtaacaaagacccatgtgatgctgggggcagagacagaggagaagctgtttgatgcccccttgtccatcagcaagagagagcagctggaacagcaggtcccagagaactacttctatgtgccagacctgggccaggtgcctgagattgatgttccgtcctacctgcctgacctgcccggcattgccaacgacctcatgtacagtgccgacctgggccccggcattgccccctctgcccctggcaccattccggaactgcccaccttccacactgaggtagccgagccactcaaggcagacctacaagatggggtactaacagcaccaccaccacccccaccgcccccaccacctcccccagctcctgaggtgctggccagtgcatccccactcccaccctcaaccgcggcccctgtangccaaggcgccaggcangacnacngcancancancgcgtctccttcantccangganctcccanggaagtgntcnacccctccggtggccgggccactctgctanantccatccnccnnnctggggggna

SEQ ID NO: 72 - DNA, 1034 bp, Homo Sapiens
  misc_feature (4)..(4): n is a, c, g, or t
  misc_feature (697)..(699): n is a, c, g, or t
  misc_feature (705)..(706): n is a, c, g, or t
  misc_feature (708)..(709): n is a, c, g, or t
  misc_feature (711)..(711): n is a, c, g, or t
  misc_feature (713)..(715): n is a, c, g, or t
  misc_feature (717)..(717): n is a, c, g, or t
  misc_feature (723)..(726): n is a, c, g, or t
  misc_feature (775)..(775): n is a, c, g, or t
  misc_feature (780)..(780): n is a, c, g, or t
  misc_feature (783)..(783): n is a, c, g, or t
  misc_feature (792)..(792): n is a, c, g, or t
  misc_feature (799)..(799): n is a, c, g, or t
  misc_feature (844)..(844): n is a, c, g, or t
  misc_feature (846)..(846): n is a, c, g, or t
  misc_feature (865)..(865): n is a, c, g, or t
  misc_feature (887)..(887): n is a, c, g, or t
  misc_feature (898)..(898): n is a, c, g, or t
  misc_feature (901)..(901): n is a, c, g, or t
  misc_feature (911)..(911): n is a, c, g, or t
  misc_feature (924)..(925): n is a, c, g, or t
  misc_feature (951)..(951): n is a, c, g, or t
  misc_feature (953)..(954): n is a, c, g, or t
  misc_feature (971)..(972): n is a, c, g, or t
  misc_feature (979)..(979): n is a, c, g, or t
  misc_feature (993)..(993): n is a, c, g, or t
  misc_feature (998)..(998): n is a, c, g, or t
  misc_feature (1019)..(1019): n is a, c, g, or t
tcgngagattactatgagaggatcgcatcaccatcaccatcacggatcctatttaggtgacactatagaatcgtcgacccacgcgtccgtgtccatgtcttactactttgaccgcgatgatgtggctttgaagaactttgccaaatactttcttcaccaatctcatgaggagagggaacatgctgagaaactgatgaagctgcagaaccaacgaggtggccgaatcttccttcaggatatcaagaaaccagactgtgatgactgggagagcgggctgaatgcaatggagtgtgcattacatttggaaaaaaatgtgaatcagtcactactggaactgcacaaactggccactgacaaaaatgacccccatttgtgtgacttcattgagacacattacctgaatgagcaggtgaaagccatcaaagaattgggtgaccacgtgaccaacttgcgcaagatgggagcgcccgaatctggcttggcggaatatctctttgacaagcacaccctgggagacagtgataatgaaagctaagcctcgggctaatttccccatagccgtggggtgacttccctggtcaccaaggcagtgcatgcatgttggggtttcctttaccttttctataagttgtaccaaaacatccacttaagttctttgatttgtaccattccttcaaataaagaaatttggtacccnnnaaaaannannanannnanaaaaannnnaaagggcggccgctccctatagtgagtcgtattaacttaattagctgancttgnacncctgttganagatccngtaatgacctcaaaactccatctggatttgttcaaaacgcctcgntngccgccgggcgttttttantggtgaaaaatcccaagcttanctttggccganaantttccaggancctaagggaagcnnaaattggaaaaaaaaatccctgggantnnacccccccgtttaaatnntccccantggcatcctaaaanaaaantttttgaggcttttcacttcngttgccccaatggta

SEQ ID NO: 73 - DNA, 1139 bp, Homo Sapiens
  misc_feature (2)..(2): n is a, c, g, or t
  misc_feature (801)..(801): n is a, c, g, or t
  misc_feature (809)..(809): n is a, c, g, or t
  misc_feature (819)..(819): n is a, c, g, or t
  misc_feature (858)..(858): n is a, c, g, or t
  misc_feature (866)..(866): n is a, c, g, or t
  misc_feature (899)..(899): n is a, c, g, or t
  misc_feature (901)..(901): n is a, c, g, or t
  misc_feature (911)..(911): n is a, c, g, or t
  misc_feature (915)..(915): n is a, c, g, or t
  misc_feature (923)..(923): n is a, c, g, or t
  misc_feature (925)..(925): n is a, c, g, or t
  misc_feature (929)..(929): n is a, c, g, or t
  misc_feature (934)..(934): n is a, c, g, or t
  misc_feature (941)..(941): n is a, c, g, or t
  misc_feature (943)..(943): n is a, c, g, or t
  misc_feature (968)..(968): n is a, c, g, or t
  misc_feature (978)..(978): n is a, c, g, or t
  misc_feature (984)..(984): n is a, c, g, or t
  misc_feature (986)..(986): n is a, c, g, or t
  misc_feature (999)..(999): n is a, c, g, or t
  misc_feature (1002)..(1002): n is a, c, g, or t
  misc_feature (1006)..(1006): n is a, c, g, or t
  misc_feature (1011)..(1011): n is a, c, g, or t
  misc_feature (1014)..(1016): n is a, c, g, or t
  misc_feature (1018)..(1019): n is a, c, g, or t
  misc_feature (1022)..(1022): n is a, c, g, or t
  misc_feature (1032)..(1033): n is a, c, g, or t
  misc_feature (1035)..(1035): n is a, c, g, or t
  misc_feature (1042)..(1042): n is a, c, g, or t
  misc_feature (1072)..(1072): n is a, c, g, or t
  misc_feature (1082)..(1082): n is a, c, g, or t
  misc_feature (1091)..(1091): n is a, c, g, or t
  misc_feature (1100)..(1100): n is a, c, g, or t
  misc_feature (1103)..(1103): n is a, c, g, or t
  misc_feature (1126)..(1126): n is a, c, g, or t
tnctatgagaggatcgcatcaccatcaccatcacgggatcctatttaggtgacactatagaatcgtcgacccacgcgtccgagacacttccggttgcgacggaggtaggcttacgaggcctgtgtcgggtagaaagggtccttcctggaccgggaccctctgccacgaccatggaccgtaggaaaaagcctttggacgtcacggcctcctcgttggtagatcttaaggctgaactcttccgaaagcaagaagaattcaaacaagaaaaacttctaaaagattctggagtttttggaaaaccaaaaacaactaacaagaaaccaagtatctggagcaaacagaatgtaggcgtttcaaatcgagctgagaaggatgctgaacagaagattgaagaacagaagactttagacaaagcaagggaaaaattggaagaaaaagccaaattatatgaaaaaatgactaaaggagactttatagatgaagaagtagaggatatgtaccttgtggatttcacacagaagatcatagacaagcgcaaagaaatggaggcatctggtgcccatagagattctcaaaaggcaggagaaagggacgacgatgaggaaaaccttcctgagggagagatccctcctccccaagaccccagtgaagaatgggtggattacgtggactctttggggcgttcccggcgctgtatgagaaaggatttgccagatctgctggagatggataaaaatcttcaggggagactgtaagtgtgtgtggtatacagagctctgccaaggtctgaaaatgcagccncagggatngttttgtganggggaggctgttttataattaatgatctctgttgctccngtaagganatattgattgattgattgattgatggattggancnctttttaagnggtnagcatgcncntccnccccntaatccncncttggggaacaaccctgactggggnatgaataaanctgtcncntttttacttgganggntgtnggccnccnnntnnccnaataaccccnncngaacccnccaaccccggcttttggggaaaacaagggntttgaaaaanacccttgantttcccccnaanagggggcccccgggaaaaaactnaccccctttttct

SEQ ID NO: 74 - DNA, 1294 bp, Homo Sapiens
  misc_feature (3)..(3): n is a, c, g, or t
  misc_feature (881)..(881): n is a, c, g, or t
  misc_feature (970)..(970): n is a, c, g, or t
  misc_feature (987)..(987): n is a, c, g, or t
  misc_feature (1001)..(1001): n is a, c, g, or t
  misc_feature (1003)..(1003): n is a, c, g, or t
  misc_feature (1008)..(1008): n is a, c, g, or t
  misc_feature (1012)..(1012): n is a, c, g, or t
  misc_feature (1020)..(1020): n is a, c, g, or t
  misc_feature (1031)..(1031): n is a, c, g, or t
  misc_feature (1037)..(1037): n is a, c, g, or t
  misc_feature (1056)..(1056): n is a, c, g, or t
  misc_feature (1062)..(1062): n is a, c, g, or t
  misc_feature (1065)..(1065): n is a, c, g, or t
  misc_feature (1090)..(1090): n is a, c, g, or t
  misc_feature (1094)..(1094): n is a, c, g, or t
  misc_feature (1110)..(1110): n is a, c, g, or t
  misc_feature (1133)..(1133): n is a, c, g, or t
  misc_feature (1143)..(1143): n is a, c, g, or t
  misc_feature (1151)..(1151): n is a, c, g, or t
  misc_feature (1162)..(1162): n is a, c, g, or t
  misc_feature (1181)..(1181): n is a, c, g, or t
  misc_feature (1186)..(1186): n is a, c, g, or t
  misc_feature (1190)..(1190): n is a, c, g, or t
  misc_feature (1193)..(1193): n is a, c, g, or t
  misc_feature (1198)..(1198): n is a, c, g, or t
  misc_feature (1201)..(1201): n is a, c, g, or t
  misc_feature (1207)..(1207): n is a, c, g, or t
  misc_feature (1212)..(1213): n is a, c, g, or t
  misc_feature (1218)..(1218): n is a, c, g, or t
  misc_feature (1221)..(1221): n is a, c, g, or t
  misc_feature (1224)..(1224): n is a, c, g, or t
  misc_feature (1229)..(1229): n is a, c, g, or t
  misc_feature (1232)..(1232): n is a, c, g, or t
  misc_feature (1252)..(1252): n is a, c, g, or t
  misc_feature (1262)..(1262): n is a, c, g, or t
  misc_feature (1266)..(1266): n is a, c, g, or t
  misc_feature (1269)..(1269): n is a, c, g, or t
  misc_feature (1281)..(1281): n is a, c, g, or t
  misc_feature (1284)..(1284): n is a, c, g, or t
atngagaaattactatgagaggatcgcatcaccatcaccatcacggatcctatttaggtgacactatagaatcgtcgacccacgcgtccggcggggagctggagccagagcggctaccccgaaagctgcgggccgagcttgaggccgcgctggggaagaagcacaagggcggtgatagctccagtggcccccaacgcttggtttctttccgtctcatccgggatctgcaccagcatctgagagaaagggattccaaactatacctccatgagctcctagaaggcagtgaaatctatctcccagaggttgtgaagcctccacggaacccagaactagttgcccggctggagaagattaagatacagctggccaatgaggaatataaacggatcacccgcaacgtcacttgtcaggatacaagacatggtgggactctcagcgacctgggaaagcaagtgagatcattgaaggctctggtcatcaccatcttcaatttcattgtcacggtggttgctgccttcgtctgcacttaccttggaagccaatatatcttcacagaaatggcctcgcgggtgctagctgcattaatcgtcgcctctgtggtgggtctggccgagctgtatgtcatggtgcgggcaatggaaggcgagctgggagaactgtaactggtgcttcatcatcaagtctagagaagactttgggggcttcaggctccaattggcagtcaccgactcagtcaacccatcagactttttgtattcagctccagttagtcagaagaccagcccaggccagctgctgtttctgtggggagccctaatcttctgtgaatttccaaagggagcattggaggagattgagataacacatctttaaaacanaaagaactggtcttggtctatcagtacctcttcctgaatctggtacccatctgccttctccagttcattctaaacactgctgggactanggtttttccatcaggancaatggaatccagncnttccnaaantaaaccanactgccttganttgtcntatgtacaactgatcccanctttcncanaatttttatgcaaactggaattganttcnaaacctccaaaaaaanaaaaggatcccctttcccatttnggctggaaangactgatnaaaacttcaanaaaaaaaatggtttctaangatgnaaantgnaacangcncctccnttttnnaaaanaanggnttagnccntttccaaaaaaaaaaacccnaaaataaggncccnggncctttttttaangancaaaacccat

SEQ ID NO: 75 - DNA, 1179 bp, Homo Sapiens
  misc_feature (825)..(825): n is a, c, g, or t
  misc_feature (828)..(828): n is a, c, g, or t
  misc_feature (849)..(849): n is a, c, g, or t
  misc_feature (882)..(882): n is a, c, g, or t
  misc_feature (897)..(897): n is a, c, g, or t
  misc_feature (922)..(922): n is a, c, g, or t
  misc_feature (940)..(940): n is a, c, g, or t
  misc_feature (982)..(982): n is a, c, g, or t
  misc_feature (991)..(992): n is a, c, g, or t
  misc_feature (999)..(999): n is a, c, g, or t
  misc_feature (1001)..(1001): n is a, c, g, or t
  misc_feature (1006)..(1006): n is a, c, g, or t
  misc_feature (1014)..(1014): n is a, c, g, or t
  misc_feature (1022)..(1022): n is a, c, g, or t
  misc_feature (1039)..(1039): n is a, c, g, or t
  misc_feature (1046)..(1047): n is a, c, g, or t
  misc_feature (1056)..(1056): n is a, c, g, or t
  misc_feature (1058)..(1058): n is a, c, g, or t
  misc_feature (1062)..(1062): n is a, c, g, or t
  misc_feature (1067)..(1067): n is a, c, g, or t
  misc_feature (1075)..(1075): n is a, c, g, or t
  misc_feature (1084)..(1085): n is a, c, g, or t
  misc_feature (1091)..(1091): n is a, c, g, or t
  misc_feature (1098)..(1098): n is a, c, g, or t
  misc_feature (1122)..(1122): n is a, c, g, or t
  misc_feature (1142)..(1143): n is a, c, g, or t
  misc_feature (1149)..(1150): n is a, c, g, or t
  misc_feature (1153)..(1153): n is a, c, g, or t
  misc_feature (1158)..(1158): n is a, c, g, or t
  misc_feature (1168)..(1168): n is a, c, g, or t
  misc_feature (1178)..(1179): n is a, c, g, or t
aatagagaaattactatgagaggatcgcatcaccatcaccatcacggatcctatttaggtgacactatagaatcgtcgacccacgcgtccgggcggcgcccggatctcttccgccgccattttaaatccagctccatacaacgctccgccgccgctgctgccgcgacccggactgcgcgccagcacccccctgccgacagctccgtcactatggaggatatgaacgagtacagcaatatagaggaattcgcagagggatccaagatcaacgcgagcaagaatcagcaggatgacggtaaaatgtttattggaggcttgagctgggatacaagcaaaaaagatctgacagagtacttgtctcgatttggggaagttgtagactgcacaattaaaacagatccagtcactgggagatcaagaggatttggatttgtgcttttcaaagatgctgctagtgttgataaggttttggaactgaaagaacacaaactggatggcaaattgatagatcccaaaagggccaaagctttaaaagggaaagaacctcccaaaaaggtttttgtgggtggattgagcccggatacttctgaagaacaaattaaagaatattttggagcctttggagagattgaaaatattgaacttcccatggatacaaaaacaaatgaaagaagaggattttgttttatcacatatactgatgaagagccagtaaaaaaattgttagaaagcagataccatcaaattggttctgggaagtgtgaaatcaaagttgcacaacccaaagaggtatataggcagcaacagcaacaacaaaaaggtggnaanaagtgctgcagctggtggacnaagtggtacgaggggtcgtggccgaagtcaggnccaaaactggaaccnaggatttaataactattatgatcanggatatggaaattacaanagtgcctatggggggggatcaaaactatagtggctatggcgnaaatgattnncctgggnanaactntgggaaantttggatntggacaggggaattccnaactaanntgggccaananaacnccttntgggcaanggcttttcnngggggngggcaancccccaaaacaatttccccccctnccttaaaggaaaactttggnnaaaaannggnggaangtttaaatanccccctttgnn

SEQ ID NO: 76 - DNA, 1179 bp, Homo Sapiens
  misc_feature (922)..(922): n is a, c, g, or t
  misc_feature (936)..(936): n is a, c, g, or t
  misc_feature (938)..(938): n is a, c, g, or t
  misc_feature (956)..(956): n is a, c, g, or t
  misc_feature (986)..(986): n is a, c, g, or t
  misc_feature (1014)..(1014): n is a, c, g, or t
  misc_feature (1020)..(1020): n is a, c, g, or t
  misc_feature (1029)..(1029): n is a, c, g, or t
  misc_feature (1033)..(1033): n is a, c, g, or t
  misc_feature (1054)..(1054): n is a, c, g, or t
  misc_feature (1068)..(1068): n is a, c, g, or t
  misc_feature (1071)..(1071): n is a, c, g, or t
  misc_feature (1073)..(1073): n is a, c, g, or t
  misc_feature (1081)..(1081): n is a, c, g, or t
  misc_feature (1083)..(1083): n is a, c, g, or t
  misc_feature (1105)..(1105): n is a, c, g, or t
  misc_feature (1123)..(1123): n is a, c, g, or t
  misc_feature (1129)..(1129): n is a, c, g, or t
  misc_feature (1131)..(1131): n is a, c, g, or t
  misc_feature (1133)..(1133): n is a, c, g, or t
  misc_feature (1140)..(1141): n is a, c, g, or t
  misc_feature (1151)..(1151): n is a, c, g, or t
  misc_feature (1161)..(1161): n is a, c, g, or t
  misc_feature (1168)..(1168): n is a, c, g, or t
  misc_feature (1175)..(1175): n is a, c, g, or t
attagagaaattactatgagaggatcgcatcaccatcaccatcacggatcctatttaggtgacactatagaatcgtcgacccacgcgtccgctgcgagccaggattcccgatccagagacaatggccccgatgggatggagcccgaaggcgtcatcgagagtaactggaatgagattgttgacagctttgatgacatgaacctctcggagtcccttctccgtggcatctacgcctatggttttgagaagccctctgccatccagcagcgagccattctaccttgtatcaagggttatgatgtgattgctcaagcccaatctgggactgggaaaacggccacatttgccatatcaattctgcagcagattgaattagatctaaaagccacccaggccttggtcctagcacccactcgagaattggctcagcagatacagaaggtggtcatggcactaggagactacatgggcgcctcctgtcacgcctgtatcgggggcaccaacgtgcgtgctgaggtgcagaaactgcagatggaagctccccacatcatcgtgggtacccctggccgtgtgtttgatatgcttaaccggagatacctgtcccccaaatacatcaagatgtttgtactggatgaagctgacgaaatgttaagccgtggattcaaggaccagatctatgacatattccaaaagctcaacagcaacacccaggtagttttgctgtcagccacaatgccttctgatgtgcttgaggtgaccaagaagttcatgagggaccccattcggattcttgtcaagaaggaagagttgaccctggagggagtggaagctggacacactatgtgacttgtatgaaaccctgaccatcacccaggcagtcatcttcatcaacacccggaggaaggtggactggctcaccganaaaatgcatgctcnanatttcactgtatcccccntgcatggagatatggaccaaaaggaacganacgtgattatgagggagtttcgttctgnctctancaaaatttngatnacactgacctgctggccaaangcattgatgtgcancangnttctttantntcaactatgaccttcccccaangggaaaactaattccccnaaatcngncnagggganngtttggcccnaaaggggggnttttaanatggggnaaaa

SEQ ID NO: 77 - DNA, 876 bp, Homo Sapiens
  misc_feature (1)..(1): n is a, c, g, or t
  misc_feature (364)..(365): n is a, c, g, or t
  misc_feature (422)..(422): n is a, c, g, or t
  misc_feature (502)..(502): n is a, c, g, or t
  misc_feature (564)..(564): n is a, c, g, or t
  misc_feature (587)..(587): n is a, c, g, or t
  misc_feature (618)..(618): n is a, c, g, or t
  misc_feature (627)..(627): n is a, c, g, or t
  misc_feature (639)..(639): n is a, c, g, or t
  misc_feature (666)..(666): n is a, c, g, or t
  misc_feature (695)..(695): n is a, c, g, or t
  misc_feature (718)..(718): n is a, c, g, or t
  misc_feature (730)..(730): n is a, c, g, or t
  misc_feature (743)..(743): n is a, c, g, or t
  misc_feature (745)..(745): n is a, c, g, or t
  misc_feature (752)..(752): n is a, c, g, or t
  misc_feature (768)..(768): n is a, c, g, or t
  misc_feature (775)..(775): n is a, c, g, or t
  misc_feature (788)..(788): n is a, c, g, or t
  misc_feature (792)..(792): n is a, c, g, or t
  misc_feature (795)..(795): n is a, c, g, or t
  misc_feature (797)..(797): n is a, c, g, or t
  misc_feature (799)..(799): n is a, c, g, or t
  misc_feature (803)..(803): n is a, c, g, or t
  misc_feature (805)..(805): n is a, c, g, or t
  misc_feature (810)..(811): n is a, c, g, or t
  misc_feature (816)..(817): n is a, c, g, or t
  misc_feature (824)..(824): n is a, c, g, or t
  misc_feature (828)..(828): n is a, c, g, or t
  misc_feature (838)..(838): n is a, c, g, or t
  misc_feature (841)..(841): n is a, c, g, or t
  misc_feature (844)..(844): n is a, c, g, or t
  misc_feature (852)..(852): n is a, c, g, or t
  misc_feature (861)..(861): n is a, c, g, or t
natttagagaaattactatgagaggatcgcatcaccatcaccatcacggatcctatttaggtgacactatagaatcgtcgacccacgcgtccggcctccgccttcggaggctgacgcgcccgggcgccgttccaggcctgtgcagggcggatcggcagccgcctggcggcgatccagggcggtgcggggcctgggcgggagccgggaggcgcggccggcatggaggcgctgctgctgggcgcggggttgctgctgggcgcttacgtgcttgtctactacaacctggtgaaggccccgccgtgcggcggcatgggcaacctgcggggccgcacggccgtggtcacgggcgccaacagcggcatcnnaaagatgacggcgctggagctggcgcgccggggagcgcgcgtggtgctggcctgccncagccaggagcgcggggaggcggctgccttcgacctccgccaggagagtgggaacaatgaggtcatcttcatggccttgnacttggccagtctggcctcggtgcgggcctttgccactgcctttctgagctctgagccacgnttggacatcctcatccacaatgncggtatcagttcctgtggccggacccgtgangcgtttaanctgctgcttcgngtgaaccatatcggtccctttctgctnacaaatctgctgctgccttgcctgaaagnatgtgcccctaaccacgtgatgntggtaacctcanctgcccactgtcngnaaacgtnttgaacttcaaacgcnctggacngcccaatgtttgngctngcntnangaantncgggnnatatnnttaacantaanctggctaatntanttntttgcccnggaacttcncccaacaacctttga

SEQ ID NO: 78 - DNA, 931 bp, Homo Sapiens
  misc_feature (2)..(3): n is a, c, g, or t
  misc_feature (6)..(6): n is a, c, g, or t
  misc_feature (620)..(620): n is a, c, g, or t
  misc_feature (684)..(684): n is a, c, g, or t
  misc_feature (705)..(705): n is a, c, g, or t
  misc_feature (752)..(752): n is a, c, g, or t
  misc_feature (829)..(829): n is a, c, g, or t
  misc_feature (831)..(831): n is a, c, g, or t
  misc_feature (834)..(834): n is a, c, g, or t
  misc_feature (837)..(837): n is a, c, g, or t
  misc_feature (851)..(851): n is a, c, g, or t
  misc_feature (857)..(857): n is a, c, g, or t
  misc_feature (861)..(861): n is a, c, g, or t
  misc_feature (866)..(866): n is a, c, g, or t
  misc_feature (881)..(881): n is a, c, g, or t
  misc_feature (884)..(884): n is a, c, g, or t
  misc_feature (893)..(894): n is a, c, g, or t
  misc_feature (899)..(900): n is a, c, g, or t
  misc_feature (902)..(902): n is a, c, g, or t
  misc_feature (912)..(912): n is a, c, g, or t
  misc_feature (918)..(918): n is a, c, g, or t
  misc_feature (921)..(921): n is a, c, g, or t
  misc_feature (923)..(923): n is a, c, g, or t
  misc_feature (927)..(927): n is a, c, g, or t
  misc_feature (929)..(930): n is a, c, g, or t
cnngantagagaaattactatgagaggatcgcatcaccatcaccatcacggatcctatttaggtgacactatagaatcgtcgacccacgcgttccgctcgcaggcaccatgactcctgtgaggatgcagcactccctggcaggtcagacctatgccgtgcccttcatccagccagacctgcggcgagaggaggccgtccagcagatggcggatgccctgcagtacctgcagaaggtctctggagacatcttcagcaggtgttctccagtgccaagtaccctgctccagggcgcctgcaggaatatggctccatcttcacgggcgcccaggaccctggcctgcagagacgcccccgccacaggatccagagcaagcaccgccccctggacgagcgggccctgcaggagaagctgaaggactttcctgtgtgcgtgagcaccaagccggagcccgaggacgatgcagaagagggacttgggggtcttcccagcaacatcagctctgtcagctccttgctgctcttcaacaccaccgagaacctgtagaagaagtatgtcttcctggaccccctggctggtgctgtaacaaagacccatgtgatgctgggggcagagacagangagaagctgtttgatgcccccttgtccatcagcaagagagagcagctggaacagcaggtcccanagaactacttctatgtgccanacctgggtcaggtgcctgaaattgatgttccatcctacctgcctganctgcccggcattgccaacgacctcatgtacagtgccgacctgggccccggcattgccccctctgcccctggcaccantncanaantgcccaccttccanactgangtanccgancctctcaagaactanaanatggggtannaaaannanccccaacggncccaanaanancccnannt

SEQ ID NO: 79 - DNA, 1179 bp, Homo Sapiens
  misc_feature (3)..(4): n is a, c, g, or t
  misc_feature (676)..(676): n is a, c, g, or t
  misc_feature (732)..(732): n is a, c, g, or t
  misc_feature (811)..(811): n is a, c, g, or t
  misc_feature (820)..(820): n is a, c, g, or t
  misc_feature (822)..(822): n is a, c, g, or t
  misc_feature (870)..(870): n is a, c, g, or t
  misc_feature (920)..(920): n is a, c, g, or t
  misc_feature (948)..(948): n is a, c, g, or t
  misc_feature (964)..(964): n is a, c, g, or t
  misc_feature (968)..(968): n is a, c, g, or t
  misc_feature (971)..(971): n is a, c, g, or t
  misc_feature (974)..(974): n is a, c, g, or t
  misc_feature (978)..(978): n is a, c, g, or t
  misc_feature (983)..(983): n is a, c, g, or t
  misc_feature (987)..(987): n is a, c, g, or t
  misc_feature (1003)..(1003): n is a, c, g, or t
  misc_feature (1006)..(1006): n is a, c, g, or t
  misc_feature (1013)..(1013): n is a, c, g, or t
  misc_feature (1015)..(1015): n is a, c, g, or t
  misc_feature (1032)..(1032): n is a, c, g, or t
  misc_feature (1040)..(1040): n is a, c, g, or t
  misc_feature (1074)..(1074): n is a, c, g, or t
  misc_feature (1083)..(1083): n is a, c, g, or t
  misc_feature (1086)..(1087): n is a, c, g, or t
  misc_feature (1090)..(1090): n is a, c, g, or t
  misc_feature (1098)..(1098): n is a, c, g, or t
  misc_feature (1102)..(1102): n is a, c, g, or t
  misc_feature (1109)..(1109): n is a, c, g, or t
  misc_feature (1121)..(1121): n is a, c, g, or t
  misc_feature (1141)..(1141): n is a, c, g, or t
  misc_feature (1155)..(1155): n is a, c, g, or t
  misc_feature (1176)..(1176): n is a, c, g, or t
ganntagaggagaattaactatgagaggatcgcatcaccatcaccatcacggatcctatttaggtgacactatagaatcgtcgacccacgcgtccgcccacgcgatccgaagagatcgagctccctggctgccggctcgccttctgcgtggagttctcgcggtctgggtttcgctgtctgctcttggcccggggtcattttgtcggcgtcgggtgccctctcttgcccagctggggcacagcgaggcggccccttctcccgacgacgttcgatggagtagggtcccagaccgttgtcccgaagagcgagatcgagcttggccccctcccccccctccttccctccctccttccttccgccgcaacatggctaacaacagccccgcgctgacaggcaactcgcagccgcagcaccaggcggctgcagctgcggctcagcaacagcagcagtgcggcggcggcggcgctaccaagccggcggtctccggcaagcagggcaatgtgctcccgctctggggcaacgagaagaccatgaacctcaaccccatgatcctgaccaacatcctgtcgtcgccttacttcaaagtacagctctacgagctcaagacctaccacgaggtggtggacgagatctactttaaggtcacgcacgttgaaccatgggagaaaggaagcangaaaacagcgggccagacagggatgtgcggaggggttcgaggtgttggaacaggangaattgtttctacagcattttgcctgttatacaaattatttaccctgaagttaactcgaaagcaagtgatgggtcttanaacacacananactctccatatattaaagcgcttggaattatgtaaaataaaaatatanacagcccccctaaaaaaatctggtgggaactgggtttgaaaatccttccnttgaagaatgaaaaaggaacctaaaatntgaaaggcctggttgnaagnctngtntaangaacnattnggaaaaaatgcttaanaanttttttntncaaaaaaactgggaagnggtttttntaactttgttttccaaaaaattcaaatttccaanttcaaaaanaannttngattcaanaaanttaaaanccccgaccttanaaaaaaacaaaaaaaaaaangggaaaggaaggtncttaaaaaaaaaaaacaaaanttt

SEQ ID NO: 80 - DNA, 1174 bp, Homo Sapiens
  misc_feature (831)..(831): n is a, c, g, or t
  misc_feature (856)..(856): n is a, c, g, or t
  misc_feature (886)..(886): n is a, c, g, or t
  misc_feature (892)..(892): n is a, c, g, or t
  misc_feature (901)..(901): n is a, c, g, or t
  misc_feature (904)..(904): n is a, c, g, or t
  misc_feature (907)..(907): n is a, c, g, or t
  misc_feature (912)..(912): n is a, c, g, or t
  misc_feature (919)..(919): n is a, c, g, or t
  misc_feature (927)..(927): n is a, c, g, or t
  misc_feature (948)..(948): n is a, c, g, or t
  misc_feature (955)..(955): n is a, c, g, or t
  misc_feature (985)..(985): n is a, c, g, or t
  misc_feature (987)..(987): n is a, c, g, or t
  misc_feature (989)..(989): n is a, c, g, or t
  misc_feature (1005)..(1005): n is a, c, g, or t
  misc_feature (1009)..(1009): n is a, c, g, or t
  misc_feature (1018)..(1018): n is a, c, g, or t
  misc_feature (1024)..(1024): n is a, c, g, or t
  misc_feature (1027)..(1027): n is a, c, g, or t
  misc_feature (1057)..(1057): n is a, c, g, or t
  misc_feature (1077)..(1077): n is a, c, g, or t
  misc_feature (1095)..(1095): n is a, c, g, or t
  misc_feature (1100)..(1100): n is a, c, g, or t
  misc_feature (1103)..(1103): n is a, c, g, or t
  misc_feature (1110)..(1110): n is a, c, g, or t
  misc_feature (1120)..(1121): n is a, c, g, or t
  misc_feature (1139)..(1140): n is a, c, g, or t
  misc_feature (1145)..(1145): n is a, c, g, or t
  misc_feature (1174)..(1174): n is a, c, g, or t
gattagagagaattactatgagaggatcgcatcaccatcaccatcacggatcctatttaggtgacactatagaatcgtcgacccacgcgtccgcacacagggcgtgcaggccccagcgtggggaggaacgacattcgagtgcagctgctcgactatgtcatcagctccttttaccccgagatccaggctgctcatgccagcgacagcgtgcagagaaatgctgccttcttccgggaggtgacgcggcgcacggcgcggatggtggccgagtggcagtgtgtgggcttctgccacggcgtgctcaacaccgacaacatgagcatcctggggctcaccatcgactacgggccctttggcttcctggacaggtacgaccccgaccacgtgtgcaatgcctccgacaacaccggccgctacgcgtacagcaagcagcccgaggtgtgcaggtggaacctgcggaagctggccgaggccctgcagccggaactgcccctggagctgggggaggccatcctggccgaggagtttgacgccgagttccaaaggcactacctgcagaagatgcgcaggaagctgggcctcgtgcaggtggagctggaggaagacggggcgctggtgtccaagctcctggagaccatgcatctgaccggtgccgacttcacaaacaccttctacttgctgagctccttcccagtggagctagagtcgccaggcctggcggaattcctggccaggctgatggagcagtgtgcctccctggaggagctgaggctggccttccggccccagatggatccccggcagctatccatgatgctgatgctggcgcantcaaacccgcagctgttcgcgcttnatgggcacccgggcaggcatcgccaggganctggancgtgtggancancantctcngctggancacctgantgcggcaaaactgcaaaacangaaccanggccactgggctgactggctacaggcgtanananccccggctggacaagnactnggaaaggcnctgggnacnctgccccctggcaggctgaacacgtgcccntgaagcaccccaacaacccnaaatacgtgctgaagaantaatnccnccaaaangccatcaagnnttccaaaccggggaattnncaaangggcgggggggtttaaaaatattggaaan

SEQ ID NO: 81 - DNA, 848 bp, Homo Sapiens
  misc_feature (2)..(3): n is a, c, g, or t
  misc_feature (532)..(532): n is a, c, g, or t
  misc_feature (597)..(597): n is a, c, g, or t
  misc_feature (631)..(631): n is a, c, g, or t
  misc_feature (686)..(686): n is a, c, g, or t
  misc_feature (737)..(737): n is a, c, g, or t
  misc_feature (754)..(754): n is a, c, g, or t
  misc_feature (759)..(759): n is a, c, g, or t
  misc_feature (762)..(762): n is a, c, g, or t
  misc_feature (771)..(771): n is a, c, g, or t
  misc_feature (784)..(784): n is a, c, g, or t
  misc_feature (788)..(788): n is a, c, g, or t
  misc_feature (797)..(797): n is a, c, g, or t
  misc_feature (802)..(802): n is a, c, g, or t
  misc_feature (810)..(810): n is a, c, g, or t
  misc_feature (820)..(821): n is a, c, g, or t
  misc_feature (824)..(824): n is a, c, g, or t
  misc_feature (827)..(827): n is a, c, g, or t
  misc_feature (829)..(830): n is a, c, g, or t
  misc_feature (835)..(835): n is a, c, g, or t
  misc_feature (837)..(837): n is a, c, g, or t
  misc_feature (839)..(839): n is a, c, g, or t
anntagagagaattactatgagaggatcgcatcaccattcaccatcacggatcctatttaggtgacactatagaatcgtcgacccacgcgtccgagctcggtgcagaagcccagcagccggcgtgccgccgcccggccactccagcgccttcttccccgccttgcgctcctgccccaactcgcgctgtcgtcggaccccggcccatccagcagcgctcggcgcccaccaggcggacgcccaggagaacccctgcctccgtcgcggctcctggagagctgatcgttcacctgccccggcccgcctgaggacgggggtgccttcatgcggcccccacactcctcaccccgccgccgccgccgtccccgagctccgcacagtgcgccccagccccagcagggcgcacaactttggaagtctcgcggcgctccgagaggcggcagagtccgcgccccagccccgggccgggccgggccagaaccgcagcgtctgggggaagccagagagtcggtaatcgcttcggggatgtaaggngacagacataggacccccgagctcgcatcagcacccttcggctgcctcccggggtgggggcgggncccgcacacggtaagacctcttgctttcgctcangctcaagattcaagatacagatattgatatgtatatatatatttaatttcctgtnatccttccaagttatcaggccaccgatgatttttgttctcccttcttgaanaataaatctctctttanccatnggntctccctantctctcacgccgnttanaaataaaanttggntgtattangagctcgaannaanaangnncccancnanagcgtctga

SEQ ID NO: 82 - DNA, 815 bp, Homo Sapiens
  misc_feature (788)..(789): n is a, c, g, or t
  misc_feature (791)..(791): n is a, c, g, or t
  misc_feature (795)..(798): n is a, c, g, or t
  misc_feature (800)..(815): n is a, c, g, or t
gagaaattactatgagaggatcgcatcaccatcaccatcacggatcctatttaggtgacactatagaatcgtcgacccacgcgtccgcccacgcgtccgcggacgcgtgggcaaattatgctgcagcatattgtactggcctgctgctggcccgcaggcttctcaataggtttggcatggacaagatctatgaaggccaagtggaggtgactggtgatgaatacaatgtggaaagcattgatggtcagccaggtgccttcacctgctatttggatgcaggccttgccagaactaccactggcaataaagtttttggtgccctgaagggagctgtggatggaggcttgtctatccctcacagtaccaaacgattccctggttatgattctgaaagcaaggaatttaatgcagaagtacatcggaagcacatcatgggccagaatgttgcagattacatgcgctacttaatggaagaagatgaagatgcttacaagaaacagttctctcaatacataaagaacagcgtaactccagacatgatggaggagatgtataagaaagctcatgctgctatacgagagaatccagtctatgaaaagaagcccaagaaagaagttaaaaagaagaggtggaaccgtcccaaaatgtcccttgctcagaagaaggatcgggtagctcaaaagaaggcaagcttcctcagagctcaggagcgggctgctgagagctaaacccagcaattttctatgattttttcagatatagataataaacttatgaacagcacctannanaaannnnannnnnnnnnnnnnnnn

SEQ ID NO: 83 - DNA, 226 bp, Homo Sapiens
  misc_feature (3)..(10): n is a, c, g, or t
  misc_feature (12)..(14): n is a, c, g, or t
  misc_feature (16)..(16): n is a, c, g, or t
  misc_feature (24)..(24): n is a, c, g, or t
  misc_feature (30)..(31): n is a, c, g, or t
  misc_feature (35)..(35): n is a, c, g, or t
  misc_feature (47)..(47): n is a, c, g, or t
  misc_feature (49)..(51): n is a, c, g, or t
  misc_feature (59)..(60): n is a, c, g, or t
  misc_feature (63)..(63): n is a, c, g, or t
  misc_feature (74)..(74): n is a, c, g, or t
  misc_feature (91)..(91): n is a, c, g, or t
  misc_feature (93)..(93): n is a, c, g, or t
  misc_feature (98)..(98): n is a, c, g, or t
  misc_feature (115)..(115): n is a, c, g, or t
  misc_feature (130)..(130): n is a, c, g, or t
  misc_feature (134)..(134): n is a, c, g, or t
  misc_feature (147)..(148): n is a, c, g, or t
  misc_feature (150)..(150): n is a, c, g, or t
  misc_feature (157)..(157): n is a, c, g, or t
  misc_feature (161)..(161): n is a, c, g, or t
  misc_feature (170)..(170): n is a, c, g, or t
  misc_feature (175)..(175): n is a, c, g, or t
  misc_feature (190)..(190): n is a, c, g, or t
  misc_feature (198)..(198): n is a, c, g, or t
  misc_feature (210)..(210): n is a, c, g, or t
  misc_feature (218)..(218): n is a, c, g, or t
  misc_feature (222)..(222): n is a, c, g, or t
acnnnnnnnntnnntncaaaaaanaggggnnaaantttttttttggngnnnggggggtnnggnctcttcacccnctcacactctccgcggnanatccnattatttataggggtgnacactatattaaaanctcnctcacaccacacnncnctcgcgncggnacaaccggngtgcnaggaaagaccgcgcngtgacacngagcatgcgagnacagcgantatnaaat

SEQ ID NO: 84 - DNA, 1092 bp, Homo Sapiens
  misc_feature (3)..(3): n is a, c, g, or t
  misc_feature (25)..(25): n is a, c, g, or t
  misc_feature (908)..(908): n is a, c, g, or t
  misc_feature (914)..(914): n is a, c, g, or t
  misc_feature (920)..(920): n is a, c, g, or t
  misc_feature (941)..(941): n is a, c, g, or t
  misc_feature (956)..(957): n is a, c, g, or t
  misc_feature (962)..(962): n is a, c, g, or t
  misc_feature (967)..(967): n is a, c, g, or t
  misc_feature (986)..(986): n is a, c, g, or t
  misc_feature (994)..(995): n is a, c, g, or t
  misc_feature (1019)..(1020): n is a, c, g, or t
  misc_feature (1027)..(1027): n is a, c, g, or t
  misc_feature (1036)..(1036): n is a, c, g, or t
  misc_feature (1045)..(1045): n is a, c, g, or t
  misc_feature (1049)..(1050): n is a, c, g, or t
  misc_feature (1052)..(1052): n is a, c, g, or t
  misc_feature (1054)..(1054): n is a, c, g, or t
  misc_feature (1064)..(1064): n is a, c, g, or t
  misc_feature (1079)..(1079): n is a, c, g, or t
  misc_feature (1081)..(1081): n is a, c, g, or t
  misc_feature (1083)..(1083): n is a, c, g, or t
  misc_feature (1086)..(1086): n is a, c, g, or t
  misc_feature (1090)..(1090): n is a, c, g, or t
atngagaaattactatgagaggatngcatcaccatcaccatcacggatcctatttaggtgacactatagaatcgtcgacccacgcgtccggcaggagctgtcgggaagatcagaagccagtcatggatgaccagcgcgaccttatctccaacaatgagcaactgcccatgctgggccggcgccctggggccccggagagcaagtgcagccgcggagccctgtacacaggcttttccatcctggtgactctgctcctcgctggccaggccaccaccgcctacttcctgtaccagcagcagggccggctggacaaactgacagtcacctcccagaacctgcagctggagaacctgcgcatgaagcttcccaagcctcccaagcctgtgagcaagatgcgcatggccaccccgctgctgatgcaggcgctgcccatgggagccctgccccaggggcccatgcagaatgccaccaagtatggcaacatgacagaggaccatgtgatgcacctgctccagaatgctgaccccctgaaggtgtacccgccactgaaggggagcttcccggagaacctgagacaccttaagaacaccatggagaccatagactggaaggtctttgagagctggatgcaccattggctcctgtttgaaatgagcaggcactccttggagcaaaagcccactgacgctccaccgaaagagtcactggaactggaggacccgtcttctgggctgggtgtgaccaagcaggatctgggcccagtccccatgtgagagcagcagaggcggtcttcaacatcctgccagccccacacagctacagctttcttgctcccttcagcccccagcccctcccccatctcccaccctgtgcctcatcccatgaaaccctggtgcctggctctttcntcaccnttgganaaaaaaaccaagtcggaacancaaataacaatgcannaaggncctgntgcccaatctccatttgtnaaaggggnntgaggtcccagaagtggccaaaanntaaaaanatcccgttncttaaaatnaaannancntccaaaaaanggttccaaaaactangntnttngaanaa

SEQ ID NO: 85 - DNA, 235 bp, Homo Sapiens
gagaaattactatgagaggatcgcatcaccatcaccatcacggatcctatttaggtgacactatagaatcgtcgacccacgcgtccggaaagcgtagacccggggcccagggtctgcccgcccctgcagcctggcctccccgcacaggctgtggcttgcactccagccgctctagtctctcaggaatttgcttgttacttgtactgtgtaaataaagcttcctggttcaataccc

SEQ ID NO: 86 - DNA, 1050 bp, Homo Sapiens
  misc_feature (654)..(654): n is a, c, g, or t
  misc_feature (839)..(839): n is a, c, g, or t
  misc_feature (850)..(850): n is a, c, g, or t
  misc_feature (860)..(860): n is a, c, g, or t
  misc_feature (905)..(905): n is a, c, g, or t
  misc_feature (927)..(927): n is a, c, g, or t
  misc_feature (930)..(930): n is a, c, g, or t
  misc_feature (932)..(932): n is a, c, g, or t
  misc_feature (942)..(942): n is a, c, g, or t
  misc_feature (944)..(944): n is a, c, g, or t
  misc_feature (950)..(951): n is a, c, g, or t
  misc_feature (972)..(972): n is a, c, g, or t
  misc_feature (975)..(975): n is a, c, g, or t
  misc_feature (977)..(978): n is a, c, g, or t
  misc_feature (981)..(981): n is a, c, g, or t
  misc_feature (987)..(987): n is a, c, g, or t
  misc_feature (998)..(998): n is a, c, g, or t
  misc_feature (1003)..(1003): n is a, c, g, or t
  misc_feature (1012)..(1012): n is a, c, g, or t
  misc_feature (1027)..(1027): n is a, c, g, or t
  misc_feature (1041)..(1041): n is a, c, g, or t
  misc_feature (1045)..(1045): n is a, c, g, or t
  misc_feature (1047)..(1049): n is a, c, g, or t
gagaaattactatgagaggatcgcatcaccatcaccatcacggatcctatttaggtgacactatagaatcgtcgacccacgcgtccgcgaagcagcagcgcaggttgtccccgtttcccctcccccttcccttctccggttgccttcccgggccccttacactccacagtcccggtcccgccatgtcccagaaacaagaagaagagaaccctgcggaggagaccggcgaggagaagcaggacacgcaggagaaagaaggtattctgcctgagagagctgaagaggcaaagctaaaggccaaatacccaagcctaggacaaaagcctggaggctccgacttcctcatgaagagactccagaaagggcaaaagtactttgactcaggagactacaacatggccaaagccaagatgaagaataagcagctgccaagtgcaggaccagacaagaacctggtgactggtgatcacatccccaccccacaggatctgccccagagaaagtcctcgctcgtcaccagcaagcttgcgggtggccaagttgaatgatgctgcccggggctctgccagatcctgagacgcttcccctccctgccccacccgggtcctgtgctggctcctgccccttcctgcttttgcagccaggggtcaggangtggctcgggtgtgggctggagaggcagaagccctttcctgttggtgtcccagcacatggagccccttgggctgagcaccaagaccttgaaccttttttgttttaccttttttccaaataacagttgggagaaatatcaatgaaattctgggggtgggggtggggttgaaagggtggggtggganatatggaggantatgaattanggcttggagttggtaaaaaacattcctgactatccttcttaaccncgtggctgatgtgggggtaggnatnangggaaggaantngaatannctaatgaaaaaggggttctanttnanntcngtaaanaaatgccttgntttcngtgggggtnggaaaactggtgtcnaaaaaaaaaaaacntccntnnnc

SEQ ID NO: 87 - DNA, 1000 bp, Homo Sapiens
  misc_feature (783)..(783): n is a, c, g, or t
  misc_feature (800)..(800): n is a, c, g, or t
  misc_feature (805)..(805): n is a, c, g, or t
  misc_feature (859)..(859): n is a, c, g, or t
  misc_feature (908)..(908): n is a, c, g, or t
  misc_feature (922)..(922): n is a, c, g, or t
  misc_feature (940)..(940): n is a, c, g, or t
  misc_feature (945)..(946): n is a, c, g, or t
  misc_feature (952)..(952): n is a, c, g, or t
  misc_feature (955)..(955): n is a, c, g, or t
  misc_feature (960)..(962): n is a, c, g, or t
  misc_feature (975)..(976): n is a, c, g, or t
  misc_feature (992)..(992): n is a, c, g, or t
  misc_feature (995)..(996): n is a, c, g, or t
  misc_feature (1000)..(1000): n is a, c, g, or t
aatagagaaattactatgagaggatcgcatcaccatcaccatcacggatcctatttaggtgacactatagaatcgtcgacccacgcgtccgctccggggagcagctcctgtggggcagaacggctacacacagttgggggacctggctcagcccggccccgagctttctcccacagcggggtacacagcctggacggcggagaagtagacagtcaggcgctacaggaactgacgcagatggtgtctggccctgcatcgtactctggcccaaagccttctacccagtatggagctccaggaccctttgcagcccctggtgagggaggtgccttggcggccactgggcggcccccgctgctgcccacccgagcttctcgttctcagcgtgcggccagtgaggacatgacgagtgatgaggagcgcatggtcatctgtgaggaggaaggggatgatgatgtcattgctgacgatggcttcggcaccactgacattgatctcaagtgcaaggagcgggtgaccgacagcgagagtggggacagctctggggaggacccagagggcaacaagggctttggtcggaaggtgttttcacctgtgatccgttcctcctttacccactgccgccccccactggaccctgagcccccagggcccccggatcctcctgtagcctttggcaaaggctatggttccgccccatcctcctctgcgtcctcgcctgcttcctcctcagcctcggcagccacctccttctcactgggctcaggaaccttcaaggcccangagtctggtcagggcancacancgggccccctacggcccccaccccctggggctgggggtccagcgacaccttccnaaggcaacccggttcctcccaatggatcctgccacctttccggcgcaanaaacccaaaagtgngggttggcctggaaaccnaccanncccctnaantcatnnnggccccctcccannggaagaagaaacttcntgnnaaan

SEQ ID NO: 88 - DNA, 1052 bp, Homo Sapiens
  misc_feature (792)..(792): n is a, c, g, or t
  misc_feature (803)..(803): n is a, c, g, or t
  misc_feature (856)..(856): n is a, c, g, or t
  misc_feature (895)..(895): n is a, c, g, or t
  misc_feature (898)..(898): n is a, c, g, or t
  misc_feature (935)..(935): n is a, c, g, or t
  misc_feature (952)..(952): n is a, c, g, or t
  misc_feature (956)..(956): n is a, c, g, or t
  misc_feature (959)..(959): n is a, c, g, or t
  misc_feature (970)..(970): n is a, c, g, or t
  misc_feature (975)..(975): n is a, c, g, or t
  misc_feature (991)..(991): n is a, c, g, or t
  misc_feature (1002)..(1002): n is a, c, g, or t
  misc_feature (1008)..(1008): n is a, c, g, or t
  misc_feature (1025)..(1026): n is a, c, g, or t
  misc_feature (1031)..(1052): n is a, c, g, or t
aatagagaaattactatgagaggatcgcatcaccatcaccatcacggatcctatttaggtgacactatagaatcgtcgacccacgcgtccggtgaaggcctcgttgagagaaggtctcattcggtgttttgggaagagagtcgtgtgggcccaggtctgtctgctatcagctatgccgctgcccgttgcgctgcagacccgcttggccaagagaggcatcctcaaacatctggagcctgaaccagaggaagagatcattgccgaggactatgacgatgatcctgtggactacgaggccaccaggttggagggcctaccaccaagctggtacaaggtgttcgacccttcctgcgggctcccttactactggaatgcagacacagaccttgtatcctggctctccccacatgaccccaactccgtggttaccaaatcggccaagaagctcagaagcagtaatgcagatgctgaagaaaagttggaccggagccatgacaagtcggacaggggccatgacaagtcggaccgcagccatgagaaactagacaggggccacgacaagtcagaccggggccacgacaagtctgacagggatcgagagcgtggctatgacaaggtagacagagagagagagcgagacagggaacgggatcgggaccgcgggtatgacaaggcagaccgggaagagggcaaagaacggcgccaccatcgccgggaggagctggctccctatcccaagagcaagaaggcagtaagccgaaaggatgaagagttagaccccatggaccctanctcatactcanacgccccccggggcacgtggtcaacaggactccccaagcggaatgaggccaanactggcgctgacaccacagcagctgggcccctcttccancancggccgtatccatccccaggggctgtgctccgggccnatgcaaagcctcccgancaancancaggattgaancttcngcctcctggccctggntaaaataaaanctttcnggggatcctgccccccnnaaaannnnnnnnnnnnnnnnnnnnnn

SEQ ID NO: 89 - DNA, 1064 bp, Homo Sapiens
  misc_feature (1)..(1): n is a, c, g, or t
  misc_feature (4)..(4): n is a, c, g, or t
  misc_feature (740)..(740): n is a, c, g, or t
  misc_feature (797)..(797): n is a, c, g, or t
  misc_feature (823)..(823): n is a, c, g, or t
  misc_feature (829)..(829): n is a, c, g, or t
  misc_feature (838)..(838): n is a, c, g, or t
  misc_feature (874)..(874): n is a, c, g, or t
  misc_feature (885)..(886): n is a, c, g, or t
  misc_feature (889)..(889): n is a, c, g, or t
  misc_feature (902)..(902): n is a, c, g, or t
  misc_feature (908)..(908): n is a, c, g, or t
  misc_feature (933)..(933): n is a, c, g, or t
  misc_feature (937)..(937): n is a, c, g, or t
  misc_feature (943)..(944): n is a, c, g, or t
  misc_feature (959)..(959): n is a, c, g, or t
  misc_feature (963)..(963): n is a, c, g, or t
  misc_feature (973)..(973): n is a, c, g, or t
  misc_feature (980)..(980): n is a, c, g, or t
  misc_feature (989)..(989): n is a, c, g, or t
  misc_feature (1006)..(1006): n is a, c, g, or t
  misc_feature (1008)..(1008): n is a, c, g, or t
  misc_feature (1013)..(1013): n is a, c, g, or t
  misc_feature (1017)..(1017): n is a, c, g, or t
  misc_feature (1019)..(1019): n is a, c, g, or t
  misc_feature (1025)..(1025): n is a, c, g, or t
  misc_feature (1028)..(1028): n is a, c, g, or t
  misc_feature (1035)..(1036): n is a, c, g, or t
  misc_feature (1046)..(1046): n is a, c, g, or t
  misc_feature (1051)..(1051): n is a, c, g, or t
  misc_feature (1056)..(1056): n is a, c, g, or t
  misc_feature (1060)..(1060): n is a, c, g, or t
  misc_feature (1063)..(1064): n is a, c, g, or t
natngagaaattactatgagaggatcgcatcaccatcaccatcacggatcctatttaggtgacactatagaatcgtcgacccacgcgtccgcccaggacaagacaagccgctctgcactccctgatgcggcccctgtgaccaaagacagtggtcctgggagcacaagaggagaaaaggaagacacgttattgacaaccatgcttcgaaacggagctcccctcaccagactcccgagtgacaagctgaaagcagtcatccccccattcctacccccttccagttttgagctgtggagctctgatcggtcccggacgcgtcacaacgggaaggcagaccccatgaagactgcgctgccccagagagccagcaggggccaccccgtgggcggcgggggcacagacactacacccgtcaggcctgttaaatttccaagcctccccagaagcccagcctcttctgccaattctggaaacttcaaccactcgcctcattcatcgggcggctccagtgggataggtgtgagccggcacggtggggagctgcttaaccgctcaggtggcagcatagacaatgtcttgtcccaaatcgctgcccagaggaaaaaagcagccggattattggagcagaaacccagccatcggtcaagccctgtggggccagcaccggggtccagcccgtctgagcttccagcctcccctgcaggtggcagcgctcctgttggcaagaaattggagaccancaaaaggcctccatctggaacttccactacctccaagagcacctctccaaccctcangccctcccccttcaccaaagggcacnctgcanagtcctcantgtcttcctcgtcatcccatcggcagtcaaaaacantgggggctccnncantggcaccatccanaatgangatgaactgactggaattccttaanaaanttatcnnttgaaaaaatatcancccnattttttgangaacaanaaggtgganatggaaacgtttcttcnanctganttgnanggtganttnaaagganntgggaaattnaaaanaaaangggntcnn

SEQ ID NO: 90 - DNA, 1167 bp, Homo Sapiens
  misc_feature (842)..(842): n is a, c, g, or t
  misc_feature (980)..(980): n is a, c, g, or t
  misc_feature (983)..(983): n is a, c, g, or t
  misc_feature (1013)..(1013): n is a, c, g, or t
  misc_feature (1022)..(1022): n is a, c, g, or t
  misc_feature (1036)..(1036): n is a, c, g, or t
  misc_feature (1039)..(1039): n is a, c, g, or t
  misc_feature (1046)..(1046): n is a, c, g, or t
  misc_feature (1050)..(1050): n is a, c, g, or t
  misc_feature (1053)..(1053): n is a, c, g, or t
  misc_feature (1057)..(1058): n is a, c, g, or t
  misc_feature (1064)..(1064): n is a, c, g, or t
  misc_feature (1072)..(1072): n is a, c, g, or t
  misc_feature (1076)..(1076): n is a, c, g, or t
  misc_feature (1082)..(1082): n is a, c, g, or t
  misc_feature (1086)..(1086): n is a, c, g, or t
  misc_feature (1090)..(1090): n is a, c, g, or t
  misc_feature (1099)..(1099): n is a, c, g, or t
  misc_feature (1102)..(1102): n is a, c, g, or t
  misc_feature (1110)..(1110): n is a, c, g, or t
  misc_feature (1116)..(1116): n is a, c, g, or t
  misc_feature (1136)..(1136): n is a, c, g, or t
  misc_feature (1146)..(1146): n is a, c, g, or t
  misc_feature (1156)..(1157): n is a, c, g, or t
  misc_feature (1160)..(1160): n is a, c, g, or t
  misc_feature (1164)..(1164): n is a, c, g, or t
tagagaaattactatgagaggatcgcatcaccatcaccatcacggatcctatttaggtgacactatagaatcgtcgacccacgcgtccgcggtctttctatggagcatgaggtcctacacgttaattcggaagctagagggccatcaaagcagtgttgtctcttgtgacttctcccccgactctgccctgcttgtcacggcttcttacgataccaatgtgattatgtgggacccctacaccggcgaaaggctgaggtcactccaccacacccaggttgaccccgccatggatgacagtgacgtccacattagctcactgagatctgtgtgcttctctccagaaggcttgtaccttgccacggtggcagatgacagactcctcaggatctgggccctggaactgaaaactcccattgcatttgctcctatgaccaatgggctttgctgcacattttttccacatggtggagtcattgccacagggacaagagatggccacgtccagttctggacagctcctagggtcctgtcctcactgaagcacttatgccggaaagcccttcgaagtttcctaacaacttaccaagtcctagcactgccaatccccaagaaaatgaaagagttcctcacatacaggactttttaagcaacaccacatcttgtgcttctttgtagcagggtaaatcgtcctgtcaaagggagttgctggaataatgggccaaacatctggtcttgcattgaaatagcatttctttgggattgtgaatagaatgtagcaaaaccagattccagtgtactagtcatggatctttctctccctggcatgtgaaagtcagtcttanaggaagagattccacttgcacggcaacagagccttacgttaaaattttcagtccagttatgaacagcaagtgttgaactctttctgcttgttttgattcaaagtgcagttactgatgttgttttgatatgcaactaantangcctccaaagcctctctagtggcaaaacanctcaaactncccccgctgggaanganggcttcngccnaanaccnnccttgngttctgangcangggaancatnggtncaagttccnccngctggggncaaaantgctccaaggtggccaaggntttttttttngggctccttnnganctgnagg

SEQ ID NO: 91 - DNA, 1057 bp, Homo Sapiens
tacaatttgggaggagaattaactatgagaggtcgcatcaccatcaccatcacggatcctatttaggtgacactatagaatcgtcgacccacgcgtccgcccacgcgtccggagggaagagcgagcgcggggctgctccgaagccagcagaacctcctcggacagcggccccagccgggccccagcagctcgcgtggtcggaggagaagcagctgccacagctgccgcccgagcccggcctcgcgcgccccttgccgccggctcgccggtgcctgtgcggccccaggacgccgctgcccgctcggcggccgggatgcagccggggcatggccgccggcccccagtcacctgccgcggggagcgctgagcccgttgaaattctgcctctgagaagctaacagtcttcctgtggtcgccactcctccccagcagccccctccttgccaaggacggtccagaaggagccccactggggcctccccgctcagcaaagcagacctcacctcccactaccagcttgaagtcacagcagccagaggaaattctgccaccattttcccaggtctgcagcccctccagctgggaacctgctcctggagccatccctctgcaaacagagagcccagagtgcctcggggaaaattggctgaataaaagagcgatcaggacgccacggctccgcctgaagcgatggcccagccctacccccccgcccagtacccccctccgccacagaacggcatccctgccgagtacgccccgcccccaccgcaccccacgcaggactactccggccagaccccggtccccacagagcatggcatgaccctgtacacaccagcacagactcactcccgagcagccaggctccgaggccagcacacagcccatcgccgggacccagacagtgccgcagacagacgaggcggcacagacggacagccagccgctccaccctctccgaccctacagagaagcagcagcccaagcggctacacgtctccacatcctcttccggttcaggacctcgactgcgctaatgtccgggcaattccga

SEQ ID NO: 92 - DNA, 718 bp, Homo Sapiens
  misc_feature (570)..(570): n is a, c, g, or t
  misc_feature (593)..(593): n is a, c, g, or t
  misc_feature (635)..(636): n is a, c, g, or t
  misc_feature (653)..(653): n is a, c, g, or t
  misc_feature (657)..(657): n is a, c, g, or t
  misc_feature (663)..(663): n is a, c, g, or t
  misc_feature (676)..(677): n is a, c, g, or t
  misc_feature (679)..(679): n is a, c, g, or t
  misc_feature (682)..(682): n is a, c, g, or t
  misc_feature (689)..(689): n is a, c, g, or t
  misc_feature (694)..(695): n is a, c, g, or t
  misc_feature (697)..(697): n is a, c, g, or t
  misc_feature (705)..(705): n is a, c, g, or t
  misc_feature (710)..(710): n is a, c, g, or t
  misc_feature (712)..(712): n is a, c, g, or t
  misc_feature (715)..(715): n is a, c, g, or t
agaaaattactatgagaggatcgcatcaccatcaccatcacggatcctatttaggtgacactatagaatcgtcgacccacgcgtccggcggagaagcgcgcaaggcaccggtggcagcggcgacggcagctgcgacagcaacccctgctgggccgaaactgggcagagcggagcagacgtctgaagcagcgcgagtgaggcgcgagggtagcgcccgcgcccgggaagacccctcggcgcgaaccggcagcccagccccgggtcccggttcccaaggccccgcctctagggcctggggactaatcggattgagagcgcgccggcccgggccgcgaactcgccaattgcggagggcggtggccaccgcccaatccggagcagacaggtgcgaggtccggaaggcggaggccaatcggcggcggttgcgacctgctggggcaggtctcggccaataaggaggctcgagtgacatcttcgcgcaccaatcgggagtgagggagcattcgtgcccgctcgcccttccggccagacctctatttaccaggggcgtgcagcccgcttgccaatcanagcgcggctgagcggccccgcanccaacccccgaggagcggccggctggcgtccgccgcgcccannagttggggatgtcctanaaanccatcncccctgctcccannancanccctggntccannanccctgggncgggnanccnggt

SEQ ID NO: 93 - DNA, 1282 bp, Homo Sapiens
  misc_feature (4)..(4): n is a, c, g, or t
  misc_feature (19)..(19): n is a, c, g, or t
  misc_feature (80)..(80): n is a, c, g, or t
  misc_feature (94)..(94): n is a, c, g, or t
  misc_feature (884)..(884): n is a, c, g, or t
  misc_feature (935)..(935): n is a, c, g, or t
  misc_feature (978)..(978): n is a, c, g, or t
  misc_feature (994)..(994): n is a, c, g, or t
  misc_feature (996)..(996): n is a, c, g, or t
  misc_feature (1006)..(1006): n is a, c, g, or t
  misc_feature (1008)..(1008): n is a, c, g, or t
  misc_feature (1018)..(1018): n is a, c, g, or t
  misc_feature (1037)..(1037): n is a, c, g, or t
  misc_feature (1057)..(1057): n is a, c, g, or t
  misc_feature (1060)..(1060): n is a, c, g, or t
  misc_feature (1096)..(1096): n is a, c, g, or t
  misc_feature (1105)..(1105): n is a, c, g, or t
  misc_feature (1108)..(1108): n is a, c, g, or t
  misc_feature (1115)..(1115): n is a, c, g, or t
  misc_feature (1123)..(1123): n is a, c, g, or t
  misc_feature (1126)..(1127): n is a, c, g, or t
  misc_feature (1130)..(1130): n is a, c, g, or t
  misc_feature (1145)..(1145): n is a, c, g, or t
  misc_feature (1147)..(1147): n is a, c, g, or t
  misc_feature (1150)..(1151): n is a, c, g, or t
  misc_feature (1155)..(1155): n is a, c, g, or t
  misc_feature (1162)..(1162): n is a, c, g, or t
  misc_feature (1178)..(1178): n is a, c, g, or t
  misc_feature (1181)..(1181): n is a, c, g, or t
  misc_feature (1187)..(1187): n is a, c, g, or t
  misc_feature (1190)..(1190): n is a, c, g, or t
  misc_feature (1195)..(1195): n is a, c, g, or t
  misc_feature (1201)..(1202): n is a, c, g, or t
  misc_feature (1205)..(1205): n is a, c, g, or t
  misc_feature (1214)..(1214): n is a, c, g, or t
  misc_feature (1216)..(1216): n is a, c, g, or t
  misc_feature (1223)..(1223): n is a, c, g, or t
  misc_feature (1232)..(1232): n is a, c, g, or t
  misc_feature (1237)..(1237): n is a, c, g, or t
  misc_feature (1239)..(1239): n is a, c, g, or t
  misc_feature (1249)..(1249): n is a, c, g, or t
  misc_feature (1253)..(1253): n is a, c, g, or t
  misc_feature (1263)..(1263): n is a, c, g, or t
  misc_feature (1268)..(1269): n is a, c, g, or t
gatngaggaaaattactangagagggatgcatcaccatcaccatcacggatcctattttagggtgacactatagaatcgntcgacccacgccgntccgagaccggccggggaagacattgccaatctagctgatgaattcaaggatcacttggtgcctgaccctggctgccattatgaccaactaattgaaattaacctcagtgagctgaagccacacatcaatgggcccttcacccctgacctggctcaccctgtggcagaagtgggcaaggtggcagagaaggaaggatggcctctggacatccgagtgggtctaattggtagctgcaccaattcaagctatgaagatatggggcgctcagcagctgtggccaagcaggcactggcccatggcctcaagtgcaagtcccagttcaccatcactccaggttccgagcagatccgcgccaccattgagcgggacggctatgcacagatcttgagggatctgggtggcattgtcctggccaatgcttgtggcccctgcattggccagtgggacaggaaggacatcaagaagggggagaagaacacaatcgtcacctcctacaacaggaacttcacgggccgcaacgacgcaaaccccgagacccatgcctttgtcacgtccccagagattgtcacagccctggccattgcgggaaccctcaagttcaacccagagaccgactacctgacgggcacggatggcaagaagttcaggctggaggctccggatgcagatgagcttcccaaaggggagtttgacccagggcaggacacctaccagcacccacccaaggacagcagcgggcagcatgtggacgtgagccccaccagccagcgcctgcagctcctggagccnttttgacaagtgggatggcaaggacctggaggacctgcaaatcctcatcanggtcaaagggaagtgtaccactgaccacatctcagctgctggncccctggctcagttcngngggcctttgnanaacatctccnacaaacctggctcattggngcccatcaacattgaaaaanggnaaggccaactccgtgggcaatgccgtccctcagaantttggcccngtncctgaanctggcccnctnntanaaaaaaaattggcancnggnngggnggggatnggaaaaaaaaaattanggngaaggntcnaaccnggaacnngcnctcttgaancnccccccnttgggggcnggccntntccccaaaantttnccggatcccnaaacnncctgaaaaaaggg

SEQ ID NO: 94 - DNA, 1179 bp, Homo Sapiens
  misc_feature (821)..(821): n is a, c, g, or t
  misc_feature (831)..(831): n is a, c, g, or t
  misc_feature (897)..(897): n is a, c, g, or t
  misc_feature (921)..(921): n is a, c, g, or t
  misc_feature (948)..(948): n is a, c, g, or t
  misc_feature (979)..(979): n is a, c, g, or t
  misc_feature (981)..(981): n is a, c, g, or t
  misc_feature (991)..(991): n is a, c, g, or t
  misc_feature (996)..(996): n is a, c, g, or t
  misc_feature (1002)..(1002): n is a, c, g, or t
  misc_feature (1005)..(1005): n is a, c, g, or t
  misc_feature (1033)..(1033): n is a, c, g, or t
  misc_feature (1035)..(1035): n is a, c, g, or t
  misc_feature (1037)..(1037): n is a, c, g, or t
  misc_feature (1040)..(1040): n is a, c, g, or t
  misc_feature (1045)..(1045): n is a, c, g, or t
  misc_feature (1048)..(1048): n is a, c, g, or t
  misc_feature (1053)..(1054): n is a, c, g, or t
  misc_feature (1056)..(1057): n is a, c, g, or t
  misc_feature (1059)..(1059): n is a, c, g, or t
  misc_feature (1068)..(1068): n is a, c, g, or t
  misc_feature (1081)..(1081): n is a, c, g, or t
  misc_feature (1086)..(1086): n is a, c, g, or t
  misc_feature (1090)..(1090): n is a, c, g, or t
  misc_feature (1106)..(1107): n is a, c, g, or t
  misc_feature (1116)..(1116): n is a, c, g, or t
  misc_feature (1118)..(1118): n is a, c, g, or t
  misc_feature (1137)..(1137): n is a, c, g, or t
  misc_feature (1139)..(1139): n is a, c, g, or t
  misc_feature (1141)..(1141): n is a, c, g, or t
  misc_feature (1145)..(1145): n is a, c, g, or t
  misc_feature (1160)..(1160): n is a, c, g, or t
  misc_feature (1163)..(1163): n is a, c, g, or t
  misc_feature (1165)..(1165): n is a, c, g, or t
atagagaaattactatgagaggatcgcatcaccattcaccatcacggatcctatttaggtgacactatagaatcgtcgacccacgcgtccgcccacgcgtccggtgtgctggacctgtctgtcaagtccagcctttcaggagttgaaaatctgaacagctcttatttctcttcacaggacgtgctgagaagcaacctggtgcaggtgaaggtggagaaagaggcttcctgtgatgagagtgatgttggcactaatgactatgacatggaacatagcactgtgaaagaaagtgtgagcactaataacagggtacagtatgagccggcccatctggctcccctgagggaggactcggtcttgagggagctggaccgggaggacaaagccagtgatgatgagatgatgaccccagagagcgagcgtgtccaggtggagggaggcatggagagcagtctgctcccctacgtctccaacatcctgagccccgcgggccagatcttcatgtgccccctgtgcaacaaggtcttccccagcccccacatcctgcagatccacctgagcacgcacttccgcgagcaggacggcatccgcagcaagcccgccgccgatgtcaacgtgcccacgtgctcgctgtgtgggaagactttctcttgcatgtacaccctcaagcgccacgagaggactcactcgggggagaagccctacacatgcacccagtgcggcaagagcttccagtactcgcacaacctgagccgccatgccgtggtgcacacccgcgagaagccgcacgcctgcaagtggtgcgagcgcaggttcacgcnagtccggggnacctgtacagacacattcgcaagttccactgtgagttggtgaactccttgtcggtcaaaagcgaancactgagcttgcctactgtcaaanactggaaccttaaaaaaaaacttctcnaaaacttttggaaaatatttttatttttttntnaattaatatnttatntttttnccntattttttaaatagattttttatataantngnggnacggnctnaaaannanntntttttttcntggaaaaaaaaantgggnaaanttaacttgtttttgcnntttaaaaancntggaaatctccctaatttnancnttcngaaaaaaaaaccttnaancnagtcaaaaaaaaaa

SEQ ID NO: 95 - DNA, 145 bp, Homo Sapiens
  misc_feature (2)..(3): n is a, c, g, or t
  misc_feature (15)..(15): n is a, c, g, or t
  misc_feature (17)..(17): n is a, c, g, or t
  misc_feature (21)..(21): n is a, c, g, or t
  misc_feature (26)..(26): n is a, c, g, or t
  misc_feature (34)..(34): n is a, c, g, or t
  misc_feature (44)..(46): n is a, c, g, or t
  misc_feature (52)..(52): n is a, c, g, or t
  misc_feature (59)..(59): n is a, c, g, or t
  misc_feature (61)..(61): n is a, c, g, or t
  misc_feature (63)..(63): n is a, c, g, or t
  misc_feature (72)..(73): n is a, c, g, or t
  misc_feature (79)..(80): n is a, c, g, or t
  misc_feature (99)..(99): n is a, c, g, or t
  misc_feature (104)..(104): n is a, c, g, or t
  misc_feature (113)..(113): n is a, c, g, or t
  misc_feature (116)..(116): n is a, c, g, or t
  misc_feature (118)..(118): n is a, c, g, or t
  misc_feature (127)..(127): n is a, c, g, or t
  misc_feature (133)..(133): n is a, c, g, or t
  misc_feature (135)..(135): n is a, c, g, or t
  misc_feature (138)..(139): n is a, c, g, or t
  misc_feature (143)..(143): n is a, c, g, or t
annacaaataaaaanangagnaaaanttatatangggggggggnnntggtcntcccccncntnccccccttnngggggnnttcttatttttgggggggnaccantattaaaanttngntcgaacccnacgtcntntcnncgtngt

SEQ ID NO: 96 - DNA, 1179 bp, Homo Sapiens
  misc_feature (710)..(710): n is a, c, g, or t
  misc_feature (767)..(767): n is a, c, g, or t
  misc_feature (929)..(929): n is a, c, g, or t
  misc_feature (978)..(979): n is a, c, g, or t
  misc_feature (1000)..(1000): n is a, c, g, or t
  misc_feature (1027)..(1028): n is a, c, g, or t
  misc_feature (1034)..(1034): n is a, c, g, or t
  misc_feature (1041)..(1041): n is a, c, g, or t
  misc_feature (1044)..(1044): n is a, c, g, or t
  misc_feature (1065)..(1067): n is a, c, g, or t
  misc_feature (1091)..(1091): n is a, c, g, or t
  misc_feature (1110)..(1110): n is a, c, g, or t
  misc_feature (1115)..(1115): n is a, c, g, or t
  misc_feature (1122)..(1122): n is a, c, g, or t
  misc_feature (1124)..(1124): n is a, c, g, or t
  misc_feature (1129)..(1129): n is a, c, g, or t
  misc_feature (1134)..(1134): n is a, c, g, or t
  misc_feature (1147)..(1147): n is a, c, g, or t
  misc_feature (1152)..(1152): n is a, c, g, or t
  misc_feature (1163)..(1163): n is a, c, g, or t
  misc_feature (1174)..(1174): n is a, c, g, or t
tagagagaattactatgagaggatcgcatcaccatcaccatcacggatcctatttaggtgacactatagaatcgtcgacccacgcgtccgccctgtcctccagtggtgaaagctgggagactctgccggggaaagaagagcgggaacctccacaggctaaggtgagtgccagcactggcaccagccctggccccggtgctagtgccagtgccggggctggcgccggggccagtgctggcagcaatggcagcaattaccttgaagaagttcgagaaccatctcttcaggaagagcaggcatccctggaagaaggagaaattccttggctccagtaccatgagaatgacagtagcagtgagggggataatgattctggtcacgagttgatgcaacctggggtattcatgctggatggaaacaacaaccttgaagatgactccagtgtgagcgaagacctagaagtggattggagcctctttgatggatttgcagatgggttaggagtggctgaagccatttcctatgtggaccctcagttcctcacctacatggcacttgaagaacgcctggcccaggcaatggaaactgcccttgcgcacttggagtctctcgcagtggatgtagaggtggccaatccaccagcaagcaaggagagcattgacgctcttcccgagatcctggtcactgaagatcatggcgcagttggtcangagatgtgctgccccatctgctgtagcgaatatgtgaagggggaggtggcaactganctgccgtgccaccactatttccacaagcccgtgtgtgtccatctggcttcaaaagtcaggcacctgccccgtgtgccgctgcatgttccctccccccactctaaaaaaccaaggccgtttactcctggtctgaattattttccccatctgaaatcccccaanactgcaaggagccctctttgaaattaacaatgggaaataaaaccaatcnntccatttaaccctaaacctantgattcccccgggaatattttccaatnngaaaanagttgtngtntgaattgccttaaaaatccannnccctctttttaaggttaaaaaaanggaaaactaaacctttctnaatgncaacttngnaaatngcaanaaaaaaaaaaccnttttncaaccggaaanttaaatcccanttttt

SEQ ID NO: 97 - DNA, 935 bp, Homo Sapiens
  misc_feature (135)..(135): n is a, c, g, or t
  misc_feature (139)..(139): n is a, c, g, or t
  misc_feature (167)..(167): n is a, c, g, or t
  misc_feature (200)..(200): n is a, c, g, or t
  misc_feature (280)..(280): n is a, c, g, or t
  misc_feature (379)..(379): n is a, c, g, or t
  misc_feature (424)..(424): n is a, c, g, or t
  misc_feature (640)..(640): n is a, c, g, or t
  misc_feature (671)..(671): n is a, c, g, or t
  misc_feature (731)..(731): n is a, c, g, or t
  misc_feature (751)..(751): n is a, c, g, or t
  misc_feature (753)..(753): n is a, c, g, or t
  misc_feature (837)..(837): n is a, c, g, or t
  misc_feature (839)..(839): n is a, c, g, or t
  misc_feature (849)..(849): n is a, c, g, or t
  misc_feature (853)..(853): n is a, c, g, or t
  misc_feature (855)..(855): n is a, c, g, or t
  misc_feature (865)..(865): n is a, c, g, or t
  misc_feature (875)..(876): n is a, c, g, or t
  misc_feature (884)..(885): n is a, c, g, or t
  misc_feature (889)..(889): n is a, c, g, or t
  misc_feature (901)..(901): n is a, c, g, or t
  misc_feature (913)..(913): n is a, c, g, or t
  misc_feature (918)..(918): n is a, c, g, or t
  misc_feature (933)..(933): n is a, c, g, or t
tagagaaattactatgagaggatcgcatcaccatcaccatcacgggatcctatttaggtgacactatagaatcgtcgacccacgcgtccggtcggggaaaccagcacgatgtgccagtcattcctttggatgtanctancataatcagacagagaagttggacaccnacataactgaggtggatgcagcctccgtttacncgctgcctgctggagctgacttcctcatgtgttactctgttgcagaaggatattattctcaccgggaaactgtgaacggntcatggtacattcaagatttgtgtgagatgttgggaaaatatggctcctccttaaagttcacagaactcctcacactggtgaacaggaaagtttctcancgccgagtggacttttgcaaagacccaagtgcaattggaaagaancaggttccctgttttgcctcaatgctaactaaaaagctgcatttctttccaaaatctaattaattaatagaggctatctaattttacactctgtattgaaaatggctttctcagccaggcgtggttactcacacctgtaatcccagcactttgggagtccaaggtgggcggatcacctgaggtcgggagttcgagaccagcctgaccaacatgganaagccccgtctctactaaaaatgcaaaaaanaatttagctaggcatggcggcgcatgcctgcaatcccagctacttggaaggctgaggcangagaatcacttgaacccagnangtggaggctgcggtgagccgagattgcgccattgcactccagcctgggcaacgagtgaaactccgtctcaaaaaaaaaaaatgncnttctcttccnttanantaaatatcgntagggtgaanncattatgnnctantgattcaaatgnttttaaagttantgccnaccaaaaaactgccntt

SEQ ID NO: 98 - DNA, 1179 bp, Homo Sapiens
  misc_feature (1)..(1): n is a, c, g, or t
  misc_feature (726)..(726): n is a, c, g, or t
  misc_feature (782)..(782): n is a, c, g, or t
  misc_feature (830)..(830): n is a, c, g, or t
  misc_feature (861)..(861): n is a, c, g, or t
  misc_feature (900)..(900): n is a, c, g, or t
  misc_feature (908)..(908): n is a, c, g, or t
  misc_feature (920)..(920): n is a, c, g, or t
  misc_feature (932)..(932): n is a, c, g, or t
  misc_feature (956)..(956): n is a, c, g, or t
  misc_feature (968)..(968): n is a, c, g, or t
  misc_feature (970)..(970): n is a, c, g, or t
  misc_feature (978)..(978): n is a, c, g, or t
  misc_feature (999)..(999): n is a, c, g, or t
  misc_feature (1016)..(1016): n is a, c, g, or t
  misc_feature (1034)..(1034): n is a, c, g, or t
  misc_feature (1075)..(1075): n is a, c, g, or t
  misc_feature (1080)..(1080): n is a, c, g, or t
  misc_feature (1082)..(1082): n is a, c, g, or t
  misc_feature (1103)..(1103): n is a, c, g, or t
  misc_feature (1105)..(1105): n is a, c, g, or t
  misc_feature (1125)..(1125): n is a, c, g, or t
  misc_feature (1130)..(1130): n is a, c, g, or t
  misc_feature (1136)..(1136): n is a, c, g, or t
  misc_feature (1139)..(1139): n is a, c, g, or t
  misc_feature (1150)..(1150): n is a, c, g, or t
  misc_feature (1165)..(1165): n is a, c, g, or t
  misc_feature (1169)..(1169): n is a, c, g, or t
  misc_feature (1173)..(1173): n is a, c, g, or t
naaatagagaaattactatgagaggatcgcatcaccatcaccatcacggatcctatttaggtgacactatagaatcgtcgacccacgcgtccgagcggatcgcgggctcgggctgcggggctccggctgcgggcgctgggccgcgaggcgcggagcttgggagcggagcccaggccgtgccgcgcggcgccatgaagggcaaggaggagaaggagggcggcgcacggctgggcgctggcggcggaagccccgagaagagcccgagcgcgcaggagctcaaggagcagggcaatcgtctgttcgtgggccgaaagtacccggaggcggcggcctgctacggccgcgcgatcacccggaacccgctggtggccgtgtattacaccaaccgggccttgtgctacctgaagatgcagcagcacgagcaggccctggccgactgccggcgcgccctggagctggacgggcagtctgtgaaggcgcacttcttcctggggcagtgccagctggagatggagagctatgatgaggccatcgccaatctgcagcgagcttacagcctggccaaggagcagcggctgaacttcggggacgacatccccagcgctcttcgaatcgcgaagaagaagcgctggaacagcattgaggagcggcgcatccaccaggagagcgagctgcactcctacctctccaggctcattgccgcggagcgtgagagggagctggaanagtgccagcgaaaccacgagggtgatgaggacgacagccacgtccgggcccagcangcctgcattgaggccaagcacgacaagtacatggcggacatggacganctttttttctcaggtggatgaaaaaaggaanaagcgagacatcccccgactacctgtgtggcaagatcancttttganctgatgcggganccgtgcatcacncccaagtggcatcacctacaaccncaaggaaattcnangaaacacntgcagcgtgtgggttattttnacccccttaaccggaanccccttaaccaagaaaanctcatccccactttggttttaaagaagttattgacccattnttttntnaaaatggctgggtggaaaaananttaagtttccctgccctaantgggnccttgntcnagggaaccctngggaaaaacccccgncccntaanaaattt

SEQ ID NO: 99 - DNA, 479 bp, Homo Sapiens
  misc_feature (86)..(87): n is a, c, g, or t
  misc_feature (96)..(96): n is a, c, g, or t
  misc_feature (101)..(101): n is a, c, g, or t
  misc_feature (104)..(104): n is a, c, g, or t
  misc_feature (112)..(112): n is a, c, g, or t
  misc_feature (115)..(115): n is a, c, g, or t
  misc_feature (124)..(124): n is a, c, g, or t
  misc_feature (131)..(131): n is a, c, g, or t
  misc_feature (143)..(143): n is a, c, g, or t
  misc_feature (147)..(147): n is a, c, g, or t
  misc_feature (172)..(172): n is a, c, g, or t
  misc_feature (186)..(186): n is a, c, g, or t
  misc_feature (189)..(189): n is a, c, g, or t
  misc_feature (191)..(192): n is a, c, g, or t
  misc_feature (258)..(258): n is a, c, g, or t
  misc_feature (300)..(300): n is a, c, g, or t
  misc_feature (306)..(306): n is a, c, g, or t
  misc_feature (319)..(319): n is a, c, g, or t
  misc_feature (325)..(325): n is a, c, g, or t
  misc_feature (333)..(333): n is a, c, g, or t
  misc_feature (341)..(341): n is a, c, g, or t
  misc_feature (347)..(347): n is a, c, g, or t
  misc_feature (367)..(367): n is a, c, g, or t
  misc_feature (370)..(371): n is a, c, g, or t
  misc_feature (378)..(378): n is a, c, g, or t
  misc_feature (412)..(412): n is a, c, g, or t
  misc_feature (415)..(415): n is a, c, g, or t
  misc_feature (430)..(430): n is a, c, g, or t
  misc_feature (433)..(433): n is a, c, g, or t
  misc_feature (435)..(435): n is a, c, g, or t
  misc_feature (445)..(446): n is a, c, g, or t
  misc_feature (452)..(452): n is a, c, g, or t
  misc_feature (462)..(462): n is a, c, g, or t
  misc_feature (465)..(465): n is a, c, g, or t
  misc_feature (467)..(469): n is a, c, g, or t
  misc_feature (471)..(472): n is a, c, g, or t
  misc_feature (475)..(475): n is a, c, g, or t
tagagaaattactatgagaggatcgcatcaccatcaccatcacggatcctatttaggtgacactatagaatcgtcgacccgcgcgnncggccgagntgacncanacatgcanatntttgtgaanaccctcngtggttgaaccnctcngccttgaggtcgagcccagatgacnccaactgagaatgncananncaaaattcaagacaaggagggtatcccacctgaccatgcagcgtctgatatttgccggcgaacagntggaggatggccgcactctctcagactacaacatccataaanagtccnccctgcacctggngttgcncctgcgangtggcatnattganccttctctccgccagcttgnccnnaagtacnactgcgacaagatgatctgccgcaagtgctatgntcnccttcaccctcgtgntgncnactgccgcannaaaaantgtggtcacnccnannncnngcntccc

SEQ ID NO: 100 - DNA, 1179 bp, Homo Sapiens
  misc_feature (819)..(819): n is a, c, g, or t
  misc_feature (870)..(870): n is a, c, g, or t
  misc_feature (872)..(872): n is a, c, g, or t
  misc_feature (910)..(910): n is a, c, g, or t
  misc_feature (913)..(914): n is a, c, g, or t
  misc_feature (929)..(929): n is a, c, g, or t
  misc_feature (953)..(953): n is a, c, g, or t
  misc_feature (959)..(960): n is a, c, g, or t
  misc_feature (962)..(962): n is a, c, g, or t
  misc_feature (972)..(972): n is a, c, g, or t
  misc_feature (979)..(979): n is a, c, g, or t
  misc_feature (983)..(983): n is a, c, g, or t
  misc_feature (995)..(995): n is a, c, g, or t
  misc_feature (1004)..(1005): n is a, c, g, or t
  misc_feature (1010)..(1010): n is a, c, g, or t
  misc_feature (1018)..(1018): n is a, c, g, or t
  misc_feature (1025)..(1025): n is a, c, g, or t
  misc_feature (1038)..(1038): n is a, c, g, or t
  misc_feature (1047)..(1047): n is a, c, g, or t
  misc_feature (1060)..(1060): n is a, c, g, or t
  misc_feature (1075)..(1075): n is a, c, g, or t
  misc_feature (1080)..(1082): n is a, c, g, or t
  misc_feature (1088)..(1089): n is a, c, g, or t
  misc_feature (1101)..(1101): n is a, c, g, or t
  misc_feature (1112)..(1112): n is a, c, g, or t
  misc_feature (1117)..(1117): n is a, c, g, or t
  misc_feature (1127)..(1127): n is a, c, g, or t
  misc_feature (1137)..(1137): n is a, c, g, or t
  misc_feature (1139)..(1139): n is a, c, g, or t
  misc_feature (1141)..(1141): n is a, c, g, or t
  misc_feature (1148)..(1148): n is a, c, g, or t
  misc_feature (1152)..(1152): n is a, c, g, or t
  misc_feature (1156)..(1156): n is a, c, g, or t
  misc_feature (1159)..(1159): n is a, c, g, or t
  misc_feature (1166)..(1166): n is a, c, g, or t
  misc_feature (1169)..(1169): n is a, c, g, or t
  misc_feature (1173)..(1173): n is a, c, g, or t
  misc_feature (1176)..(1176): n is a, c, g, or t
tagagaaattactatgagaggatcgcatcaccatcaccatcacggatcctatttaggtgacactatagaatcgtcgacccacgcgtccggccagctccaccagcacgtgcagcagctacacctgggcacccggctgcctgtggtggtcgtggccaacaaagctgacctgttgcacatcaaacaggttgaccctcagcttggactgcagctagccagcatgctaggctgctcattctatgaagtgtctgtcagtgaaaattataatgatgtctacagcgccttccacgtcctctgtaaagaggtcagtcacaaacagcagcctagcagtacacccgagaagcgaagaacctccctcattcccaggcccaagtcacccaacatgcaggacctgaagaggaggtttaagcaagccctctctgccaaagtgaggactgtcacctccgtctgaagcaggaggagcactcaagggggtttggtcttcccaggaagagggcctgaggttctcctagtgcaggaacgttgaatattggcaatgattcctggttccagaaagggctggagcagaagggccaagagggcctgtggaactgctacagaaaaggaagtgttgttctgagcagggggacaggattgatgaggcttgaaagagcccactgagccactctctgaatatgtgaaatgtactctgtgtcttttcctttagagtggggagggggcataatcgtttcggtttctgcattcaactaccttgtaaatggtggtccgttgcagtttcaccaaatgtattgatgtgatttacagtgggaatgaaagaaacanataaggcattgataggctttccttttttcccccctttttttccttttttcncntttcctcctttccttttccccccttttttcccccaaanaannaaaaattggcttttnccccttaaccaaaaatgaatttgntaaacnntngaaacacctnattcttnaaanaatggccctttntaaaacctnnaaagnaaaccccnaaatttntttttttttttgnaaaaaaaangaaaaatcccccntaccccccaaaaaanaggtnnnattttnngggccccaaaantatttttttanacccnaaaaattggnaaactcctcngngnttaaaanaaancctntgnttccccnccnccanganata

SEQ ID NO: 101 - DNA, 1135 bp, Homo Sapiens
  misc_feature (1)..(3): n is a, c, g, or t
  misc_feature (847)..(847): n is a, c, g, or t
  misc_feature (867)..(867): n is a, c, g, or t
  misc_feature (875)..(875): n is a, c, g, or t
  misc_feature (910)..(910): n is a, c, g, or t
  misc_feature (915)..(915): n is a, c, g, or t
  misc_feature (945)..(945): n is a, c, g, or t
  misc_feature (973)..(973): n is a, c, g, or t
  misc_feature (979)..(979): n is a, c, g, or t
  misc_feature (1001)..(1001): n is a, c, g, or t
  misc_feature (1007)..(1007): n is a, c, g, or t
  misc_feature (1016)..(1016): n is a, c, g, or t
  misc_feature (1025)..(1025): n is a, c, g, or t
  misc_feature (1033)..(1033): n is a, c, g, or t
  misc_feature (1048)..(1048): n is a, c, g, or t
  misc_feature (1051)..(1051): n is a, c, g, or t
  misc_feature (1063)..(1064): n is a, c, g, or t
  misc_feature (1069)..(1069): n is a, c, g, or t
  misc_feature (1073)..(1074): n is a, c, g, or t
  misc_feature (1077)..(1077): n is a, c, g, or t
  misc_feature (1081)..(1081): n is a, c, g, or t
  misc_feature (1084)..(1085): n is a, c, g, or t
  misc_feature (1089)..(1090): n is a, c, g, or t
  misc_feature (1092)..(1093): n is a, c, g, or t
  misc_feature (1095)..(1095): n is a, c, g, or t
  misc_feature (1102)..(1102): n is a, c, g, or t
  misc_feature (1121)..(1121): n is a, c, g, or t
  misc_feature (1124)..(1124): n is a, c, g, or t
nnnagagaaattactatgagaggatcgcatcaccatcaccatcacggatcctatttaggtgacactatagaatcgtcgacccacgcgtccgcgggagcggagagcggaccccagagagccctgagcagccccaccgccgccgccggcctagttaccatcacaccccgggaggagccgcagctgccgcagccggccccagtcaccatcaccgcaaccatgagcagcgaggccgagacccagcagccgcccgccgccccccccgccgcccccgccctcagcgccgccgacaccaagcccggcactacgggcagcggcgcagggagcggtggcccgggcggcctcacatcggcggcgcctgccggcggggacaagaaggtcatcgcaacgaaggttttgggaacagtaaaatggttcaatgtaaggaacggatatggtttcatcaacaggaatgacaccaaggaagatgtatttgtacaccagactgccataaagaagaataaccccaggaagtaccttcgcagtgtaggagatggagagactgtggagtttgatgttgttgaaggagaaaagggtgcggaggcagcaaatgttacaggtcctggtggtgttccagttcaaggcagtaaatatgcagcagaccgtaaccattatagacgctatccacgtcgtaggggtcctccacgcaattaccagcaaaattaccagaatagtgagagtggggaaaagaacgagggatcggagagtgctcccgaaggccaggcccaacaacgccggccctaccgcaggcgaaggttcccacctttactacatgcggagaccctatgggcgtcgaccacagtattccaanccctcctgtgcagggagaantgatgganggtgctgacaaccagggtgcaggaaaacaaggtanaccantgaaggcaaaatatgtatcgggggatatanaccacgattccgcaggggcccctcctcnccaaanacagcctaaaaaaggacggcantggaanaaaataaanaaaattcangggaaatnaaaacccaaggtcancancccaccttcaanntcggntacnnccncaanttnnattnncnnangcaaaancccaaaaaaccttaaaccncanaatggaaaaaa

SEQ ID NO: 102 - DNA, 1251 bp, Homo Sapiens
  misc_feature (876)..(876): n is a, c, g, or t
  misc_feature (906)..(906): n is a, c, g, or t
  misc_feature (920)..(921): n is a, c, g, or t
  misc_feature (925)..(925): n is a, c, g, or t
  misc_feature (927)..(927): n is a, c, g, or t
  misc_feature (932)..(932): n is a, c, g, or t
  misc_feature (952)..(952): n is a, c, g, or t
  misc_feature (955)..(955): n is a, c, g, or t
  misc_feature (957)..(957): n is a, c, g, or t
  misc_feature (1013)..(1013): n is a, c, g, or t
  misc_feature (1020)..(1020): n is a, c, g, or t
  misc_feature (1029)..(1029): n is a, c, g, or t
  misc_feature (1032)..(1032): n is a, c, g, or t
  misc_feature (1048)..(1049): n is a, c, g, or t
  misc_feature (1060)..(1060): n is a, c, g, or t
  misc_feature (1068)..(1068): n is a, c, g, or t
  misc_feature (1070)..(1070): n is a, c, g, or t
  misc_feature (1087)..(1087): n is a, c, g, or t
  misc_feature (1096)..(1096): n is a, c, g, or t
  misc_feature (1105)..(1105): n is a, c, g, or t
  misc_feature (1111)..(1111): n is a, c, g, or t
  misc_feature (1124)..(1125): n is a, c, g, or t
  misc_feature (1136)..(1136): n is a, c, g, or t
  misc_feature (1143)..(1143): n is a, c, g, or t
  misc_feature (1147)..(1148): n is a, c, g, or t
  misc_feature (1157)..(1158): n is a, c, g, or t
  misc_feature (1163)..(1163): n is a, c, g, or t
  misc_feature (1170)..(1170): n is a, c, g, or t
  misc_feature (1175)..(1175): n is a, c, g, or t
  misc_feature (1184)..(1184): n is a, c, g, or t
  misc_feature (1190)..(1190): n is a, c, g, or t
  misc_feature (1192)..(1193): n is a, c, g, or t
  misc_feature (1195)..(1195): n is a, c, g, or t
  misc_feature (1223)..(1223): n is a, c, g, or t
  misc_feature (1225)..(1225): n is a, c, g, or t
  misc_feature (1234)..(1234): n is a, c, g, or t
  misc_feature (1238)..(1238): n is a, c, g, or t
  misc_feature (1247)..(1247): n is a, c, g, or t
gagaaattactatgagaggatcgcatcaccatcaccatcacggatcctatttaggtgacactatagaatcgtcgacccacgcgtccgcagggtctccggtaggggaaggcactggatcgcctcccaagtggcagattggtgagcaggaatttgaagccctcatgcggatgctcgataatctgggctacagaactggctacccttatcgataccctgctctgagagagaagtctaaaaaatacagcgatgtggaggttcctgctagtgtcacaggttactcctttgctagtgacggtgattcgggcacttgctccccactcagacacagttttcagaagcagcagcgggagaagacaagatggctgaactctggccggggcgacgaagcttccgaggaagggcagaatggaagcagtcccaagtcgaagactaagtggactaaagaggatggacatagaacttccacctctgctgtccctaacctgtttgttccattgaacactaacccaaaagaggtccaggagatgaggaacaagatccgagagcagaatttacaggacattaagacggctggccctcagtcccaggttttgtgtggtgtagtgatggacaggagcctcgtccaggatgcacctctctctgactgtacggaaactatcgaagggctcgagcttacagagcagacctttagtcccgctaaatctctctcttttagaaagggagagctggtgacggcctccaaggccatcattgaaaaggagtaccagccccacgtcattgtgagcaccacgggccccaaccccttcaccacactcacagaccgtgagctggaggagtaccgcagggaggtggagaggaagcaaaagggctctgaanaaaatctggacgaggctagagaaccgaaangaaaagagtcctcnnaacnancctgnggttcccccacccgcctccnagnantcccatcaagctggaagaaccaggaaacggatgccctaaaaaagtacctgttaccntaacctngtgccgganccnaatactggaaaagaanntgatgctgccncctttaancnaactccccccgaatttntcccctgangaaacctcnaaaaancccggcttcccannttaaaaaaggngaaaaancccnnaacccccannccccntggaggnccctnatgggggcngccccnanncncccccaaacccaccccgggggtgaaaangngcccccccntttnaagaggggncccc

SEQ ID NO: 103 - DNA, 1037 bp, Homo Sapiens
  misc_feature (514)..(514): n is a, c, g, or t
  misc_feature (771)..(771): n is a, c, g, or t
  misc_feature (791)..(791): n is a, c, g, or t
  misc_feature (826)..(826): n is a, c, g, or t
  misc_feature (838)..(838): n is a, c, g, or t
  misc_feature (841)..(841): n is a, c, g, or t
  misc_feature (850)..(850): n is a, c, g, or t
  misc_feature (854)..(854): n is a, c, g, or t
  misc_feature (857)..(857): n is a, c, g, or t
  misc_feature (863)..(863): n is a, c, g, or t
  misc_feature (877)..(877): n is a, c, g, or t
  misc_feature (915)..(915): n is a, c, g, or t
  misc_feature (918)..(918): n is a, c, g, or t
  misc_feature (936)..(936): n is a, c, g, or t
  misc_feature (947)..(947): n is a, c, g, or t
  misc_feature (951)..(951): n is a, c, g, or t
  misc_feature (958)..(958): n is a, c, g, or t
  misc_feature (960)..(960): n is a, c, g, or t
  misc_feature (963)..(963): n is a, c, g, or t
  misc_feature (965)..(966): n is a, c, g, or t
  misc_feature (970)..(970): n is a, c, g, or t
  misc_feature (972)..(973): n is a, c, g, or t
  misc_feature (979)..(979): n is a, c, g, or t
  misc_feature (991)..(991): n is a, c, g, or t
  misc_feature (1009)..(1009): n is a, c, g, or t
  misc_feature (1016)..(1016): n is a, c, g, or t
  misc_feature (1030)..(1030): n is a, c, g, or t
  misc_feature (1035)..(1035): n is a, c, g, or t
  misc_feature (1037)..(1037): n is a, c, g, or t
aattagagaaattactatgagaggatcgcatcaccatcaccatcacggatcctatttaggtgacactatagaatcgtcgacccacgcgtccgcccacgcgtccgccgagccgagcgcgcggagcagctggggccggggcgcggatgctggaagttcacatcccgtcggtggggcccgaggccgaggggcccaggcagagcccggagaaaagccacatggtgttccgagtggaggtgctgtgcagcgggcgcagacacacggtgccaaggcgctacagcgagttccacgcgctgcacaagcgggtgaggcggcgccgacctcccaccggccccggcccagcctctgtccagcccccgcccaggccctgtgaggcgggcgggcgagccccagcctccgccacccccattactgcctcagtccctgcgcagccggtcagcccccgggcctctgtgggtgggttggggccttcctcgccctcggccggtccaccactcaccagggtctgtcccagtanagcccgaaggcgggggcgcgggagggcttctggctggggcgaagagggcttgagggctcagtcgggatgctgtgatcgcacgcggtaaacctccagtagatcaagaagctgtacaaagtgcccgacttcccctcgaaacgcctgcccaactggaggaccagagggttggaacagcgccggcagggcttggaggcttacatccagggcatcctgtacctgaaccaggaggtgcccaaggagttactggaattcctganacttcggcacttccccacanaccccaaggctagcaactggggcaccctgaggganttcctgcctggnganagcaagctnccancancaccancggcctgtcctgancttcatgtggatccctatgtttgaacccctcccaaaantcnctgccaaagtggtgggtnaaatggtgtgnttcnagggccntntananntttnannattcancccaaaaaaaancccaaccaaaaggggggncttgttncccttgttcctttngccancn

SEQ ID NO: 104 - DNA, 637 bp, Homo Sapiens
  misc_feature (42)..(42): n is a, c, g, or t
  misc_feature (52)..(52): n is a, c, g, or t
  misc_feature (74)..(74): n is a, c, g, or t
tcgagaatataaaaaattatttgctttgtgagcggatacatntaatagattnattgtgagcggataacaatttncacagaattcattaaagaggagaaattaactatgagaggatcgcatcaccatcaccatcacggatcctatttaggtgacactatagaatcgtcgacccacgcgtccgatgacaacatctatcaacagaagatcaaggacctccacaaaaagtactcgtacatccgcaagaccaggcctgacggcaactgtttctatcgggctttcggattctcccacttggaggcactgctggatgacagcaaggagttgcagcggttcaaggctgtgtctgccaagagcaaggaagacctggtgtcccagggcttcactgaattcacaattgaggatttccacaacacgttcatggacctgattgagcaggtggagaagcagacctctgtcgccgacctgctggcctccttcaatgaccagagcacctccgactaccttgtggtctacctgcggctgctcacctcgggctacctgcagcgcgagagcaagttcttcgagcacttcatcgagggtggacggactgtcaaggagttctgccagcaggaggtggagcccatgtgcaaggagagcg

SEQ ID NO: 105 - DNA, 619 bp, Homo Sapiens
  misc_feature (38)..(38): n is a, c, g, or t
  misc_feature (44)..(44): n is a, c, g, or t
  misc_feature (54)..(54): n is a, c, g, or t
  misc_feature (76)..(76): n is a, c, g, or t
tcgagaaatataaaaaattatttgctttgtgagcgganacaatntaatagattnattgtgagcggataacaatttncacagaattattaaagaggagaaattaactatgagaggatcgcatcaccatcaccatcacggatcctatttaggtgacactatagaatcgtcgacccacgcgtccgggcggcttcctagtgagtcggcggctgatttagaaggaggttcaggctacggtgagccgaaggggaggattctggcttcccctgtccgtgttccatctagccacacaggagccatggaagtggcagagcccagcagccccactgaagaggaggaggaggaagaggagcactcggcagagcctcggccccgcactcgctccaatcctgaaggggctgaggaccgggcagtaggggcacaggccagcgtgggcagccgcagcgagggtgagggtgaggccgccagtgctgatgatgggagcctcaacacttcaggagccggccctaagtcctggcaggtgcccccgccagcccctgaggtccaaattcggacaccaagggtcaacctgtccagagaaagtgattatctgcctggacctgtcagaggaaatgtcactgcc

SEQ ID NO: 106 - DNA, 651 bp, Homo Sapiens
  misc_feature (9)..(9): n is a, c, g, or t
  misc_feature (41)..(41): n is a, c, g, or t
  misc_feature (44)..(44): n is a, c, g, or t
  misc_feature (49)..(49): n is a, c, g, or t
  misc_feature (71)..(71): n is a, c, g, or t
  misc_feature (627)..(627): n is a, c, g, or t
  misc_feature (641)..(641): n is a, c, g, or t
tcgagaatntaaaaattatttgctttgtgagcggatacatntangattnattgtgagcggataacaatttncacagaattattaaagaggagaaattaactatgagaggatcgcatcaccatcaccatcacggatcctatttaggtgacactatagaatcgtcgacccacgcgtccgctgcgagccaggattcccgatccagagacaatggccccgatgggatggagcccgaaggcgtcatcgagagtaactggaatgagattgttgacagctttgatgacatgaacctctcggagtcccttctccgtggcatctacgcctatggttttgagaagccctctgccatccagcagcgagccattctaccttgtatcaagggttatgatgtgattgctcaagcccaatctgggactgggaaaacggccacatttgccatatcgattctgcagcagattgaattagatctaaaagccacccaggccttggtcctagcacccactcgagaattggctcagcagatacagaaggtggtcatggcactaggagactacatgggcgcctcctgtcacgcctgtatcgggggcaccaacgtgcgtgctgaggtgcagaaactgcagatggaagctncccacatcattcgngggtacccct

SEQ ID NO: 107 - DNA, 627 bp, Homo Sapiens
  misc_feature (9)..(9): n is a, c, g, or t
  misc_feature (42)..(42): n is a, c, g, or t
  misc_feature (52)..(52): n is a, c, g, or t
  misc_feature (74)..(74): n is a, c, g, or t
tcgagaatntaaaaaattatttgctttgtgagcggatacatntaatagattnattgtgagcggataacaatttncacagaattcattaaagaggagaaattaactatgagaggatcgcatcaccatcaccatcacggatcctatttaggtgacactatagaatcgtcgacccacgcgtccgaaggcattcaggctctggatgaagtcatattttccttggaaacttatgacattacaacagttcgtgcttcagtaggtatgtatttaatttccaagtatattcggaagaacacagatagcgtggtgatcttctctggagaaggatcagatgaacttacgcagggttacatatattttcacaaggctccttctcctgaaaaagccgaggaggagagtgagaggcttctgagggaactctatttgtttgatgttctccgcgcagatcgaactactgctgcccatggtcttgaactgagagtcccatttctagatcatcgattttcttcctattacttgtctctgccaccagaaatgagaattccaaagaatgggatagaaaaacatctcctgagagagacgtttgaggattccaatctgatacccaaagagattctctggcgaccaaaa

SEQ ID NO: 108 - DNA, 645 bp, Homo Sapiens
  misc_feature (10)..(10): n is a, c, g, or t
  misc_feature (38)..(38): n is a, c, g, or t
  misc_feature (44)..(44): n is a, c, g, or t
  misc_feature (54)..(54): n is a, c, g, or t
tcgagaaatntaaaaaattatttgctttgtgagcgganacaatntaatagattnattgtgagcggataacaatttacacagaattcattaaagaggagaaattaactatgagaggatcgcatcaccatcaccatcacggatcctatttaggtgacactatagaatcgtcgacccacgcgtccggtcccggtgtggctgtgccgttggtcctgtgcggtcacttagccaagatgcctgaggaaacccagacccaagaccaaccgatggaggaggaggaggttgagacgttcgcctttcaggcagaaattgcccagttgatgtcattgatcatcaatactttctactcgaacaaagagatctttctgagagagctcatttcaaattcatcagatgcattggacaaaatccggtatgaaagcttgacagatcccagtaaattagactctgggaaagagctgcatattaaccttataccgaacaaacaagatcgaactctcactattgtggatactggaattggaatgaccaaggctgacttgatcaataaccttggtactatcgccaagtctgggaccaaagcgttcatggaagctttgcaggctggtgcagatatctctatgattggccagttcgggggttggtttt

SEQ ID NO: 109 - DNA, 636 bp, Homo Sapiens
  misc_feature (5)..(5): n is a, c, g, or t
  misc_feature (34)..(34): n is a, c, g, or t
  misc_feature (37)..(37): n is a, c, g, or t
  misc_feature (40)..(40): n is a, c, g, or t
  misc_feature (45)..(45): n is a, c, g, or t
  misc_feature (67)..(67): n is a, c, g, or t
gaatntaaaaattatttgctttgtgagcggatanatntangattnattgtgagcggataacaatttncacagaattattaaagaggagaaattaactatgagaggatcgcatcaccatcaccatcacggatcctatttaggtgacactatagaatcgtcgacccacgcgtccgcccacgcgtccgcccacgcgtccgaaaggcatgaggggtcgtcttcggaatctgtgccacccggcactaccatttcgagggtgaagctcctcgacaccatggtggacacttttcttcagaagctggtcgccgccggcagctaccagagattcactgactgctataagtgcttctaccagttgcagcctgcgatgacacagcaaatctatgacaagtttatagctcagttgcagacatctatccgggaggaaatctctgacatcaaagaggaggggaacctagaagctgtcttgaatgccttggataaaattgtggaagaaggcaaagtccgcaaagagccagcctggcgccccagcgggatcccagagaaggatctgcacagtgttatggcaccctacttcctgcagcaacgggacaccctgcggcgccatgtgcagaaacagggaggccgagaaccagcagc

SEQ ID NO: 110 - DNA, 616 bp, Homo Sapiens
  misc_feature (5)..(5): n is a, c, g, or t
  misc_feature (43)..(43): n is a, c, g, or t
tcganaatataaaaaattatttgctttgtgagcggatacaatnataatagattaattgtgagcggataacaatttacacagaattcattaaagaggagaaattaactatgagaggatcgcatcaccatcaccatcacggatcctatttaggtgacactatagaatcgtcgacccacgcgtccgatccgcctcaggcggagcgtgtcctgttggccctgcggcgctacctgcgtgcggagcagaaggaacagaggcacacgctgcgccactaccagcatgtggccgccgtggatcccgagaaggcacagcagatgcgcttccaggtgcatacccaccttcaagtgattgaggagagggtgaatcagagcctgggcctgcttgaccagaacccccacctggctcaggagctgcggccccaaatccaggaactcctccactctgaacacctgggtcccagtgaattggaagcccctgcccctgggggcagcagcgaggacaagggtgggctgcagcctccagattccaaggatgacacccccatgacccttccaaaagggtccacagaacaagatgctgcatcccctgagaaagagaagatgaacccgctggaacagta

SEQ ID NO: 111 - DNA, 618 bp, Homo Sapiens
  misc_feature (42)..(42): n is a, c, g, or t
  misc_feature (52)..(52): n is a, c, g, or t
  misc_feature (74)..(74): n is a, c, g, or t
tcggaaatataaaaaattatttgctttgtgagcggatacatntaatagattnattgtgagcggataacaatttncacagaattcattaaagaggagaaattaactatgagaggatcgcatcaccatcaccatcacggatcctatttaggtgacactatagaatcgtcgacccacgcgtccgaggacttgcagagccacatgatcaaacttcatggagcccccaagccccatgcatgccccacctgtgccaagtgcttcctgtctcggacagagctgcagctgcatgaagctttcaagcaccgtggtgagaagctgtttgtgtgtgaggagtgtgggcaccgggcctcgagccggaatggcctgcagatgcacatcaaggccaagcacaggaatgagaggccacacgtatgtgagttctgcagccacgccttcacccaaaaggccaatctcaacatgcacctgcgcacacacacgggtgagaagcccttccagtgccacctctgtggcaagaccttccgaacccaagccagcctggacaagcacaaccgcacccacaccggggaaaggcccttcagttgcgagttctgtgaacagcgcttcactggagaaggggcccct

SEQ ID NO: 112 - DNA, 831 bp, Homo Sapiens
  misc_feature (14)..(15): n is a, c, g, or t
  misc_feature (17)..(17): n is a, c, g, or t
  misc_feature (56)..(56): n is a, c, g, or t
  misc_feature (695)..(695): n is a, c, g, or t
  misc_feature (713)..(713): n is a, c, g, or t
  misc_feature (737)..(737): n is a, c, g, or t
  misc_feature (742)..(742): n is a, c, g, or t
  misc_feature (768)..(768): n is a, c, g, or t
  misc_feature (788)..(788): n is a, c, g, or t
  misc_feature (801)..(801): n is a, c, g, or t
  misc_feature (807)..(807): n is a, c, g, or t
  misc_feature (818)..(818): n is a, c, g, or t
ttattaaagagganntnttacttgagaggatcgcatcaccatcaccatcacggatnctatttaggtgacactatagaatcgtcgacccacgcgtccgcccgggccccgaccgcctcgcaggagcgccccaaggaggagcttggcgccgggagggaggagggggctgcggagcccgccctcacccggaaaggcgcgagggccttggcggccaaatccttggcaaggcgcagggcctaccgccggctgaatcggacggtggcggagttggtgcagttcctcctggtgaaagacaagaagaagagtcccatcacacgctcggagatggtgaaatacgttattggagacttgaagattctgttcccggacatcatcgcaagggccgcagagcatctgcggtatgtctttggttttgagctgaaacagtttgaccgcaagcaccacacttacatcctgatcaacaaactaaaacctctggaggaggaggaggaggaggaggatctgggaggagatggccccagattgggtctgttaatgatgatcctgggccttatctatatgagaggtaatagcgccagggaggcccaggtctgggagatgctgcgtcggttgggggtgcaaccctcaaagtatcatttcctctttgggtatccgaagaggcttattatggaagattttgtgcagcagcgatatctcanttacagggcgggtgcctnacaccaatccaccagcatatgaanttctnttgggggtccccggaagcaacctggnaatcagcaagatgggaagtncctggggtttcgngggccnaactgcataanaaaggaacccgca

SEQ ID NO: 113 - DNA, 137 bp, Homo Sapiens
  misc_feature (21)..(21): n is a, c, g, or t
  misc_feature (31)..(31): n is a, c, g, or t
  misc_feature (46)..(46): n is a, c, g, or t
  misc_feature (51)..(51): n is a, c, g, or t
  misc_feature (60)..(60): n is a, c, g, or t
  misc_feature (76)..(76): n is a, c, g, or t
  misc_feature (85)..(85): n is a, c, g, or t
  misc_feature (98)..(99): n is a, c, g, or t
  misc_feature (103)..(103): n is a, c, g, or t
  misc_feature (114)..(115): n is a, c, g, or t
  misc_feature (117)..(117): n is a, c, g, or t
  misc_feature (119)..(119): n is a, c, g, or t
  misc_feature (126)..(126): n is a, c, g, or t
  misc_feature (128)..(128): n is a, c, g, or t
  misc_feature (131)..(131): n is a, c, g, or t
  misc_feature (134)..(135): n is a, c, g, or t
gttcatgaacgctcggttgcnaacaagaaangaccgcatcaccatnaccanaacggtttnctagggaggtgacacnaaagaaccnccgacccacgcgnncganaaaccgcccgnnangnacacaananagngcnngg

SEQ ID NO: 114 - DNA, 153 bp, Homo Sapiens
  misc_feature (2)..(2): n is a, c, g, or t
  misc_feature (15)..(15): n is a, c, g, or t
  misc_feature (61)..(62): n is a, c, g, or t
  misc_feature (104)..(104): n is a, c, g, or t
  misc_feature (106)..(106): n is a, c, g, or t
  misc_feature (108)..(108): n is a, c, g, or t
  misc_feature (111)..(111): n is a, c, g, or t
  misc_feature (122)..(124): n is a, c, g, or t
  misc_feature (128)..(129): n is a, c, g, or t
  misc_feature (133)..(134): n is a, c, g, or t
  misc_feature (139)..(139): n is a, c, g, or t
  misc_feature (149)..(149): n is a, c, g, or t
  misc_feature (151)..(151): n is a, c, g, or t
  misc_feature (153)..(153): n is a, c, g, or t
cnttcaagaacgctnggttgccaaccatgagaggatcgcatcaccatcaccatcacggatnntatttaggtgacactatagaatcgccgacccacgcgtccggncncncgnccgacggcgcnnncccnnaggnncgganggcgcggcangnan

SEQ ID NO: 115 - DNA, 869 bp, Homo Sapiens
  misc_feature (16)..(16): n is a, c, g, or t
  misc_feature (252)..(252): n is a, c, g, or t
  misc_feature (254)..(254): n is a, c, g, or t
  misc_feature (703)..(703): n is a, c, g, or t
  misc_feature (723)..(723): n is a, c, g, or t
  misc_feature (747)..(747): n is a, c, g, or t
  misc_feature (749)..(749): n is a, c, g, or t
  misc_feature (772)..(772): n is a, c, g, or t
  misc_feature (787)..(787): n is a, c, g, or t
  misc_feature (817)..(817): n is a, c, g, or t
  misc_feature (834)..(834): n is a, c, g, or t
  misc_feature (844)..(844): n is a, c, g, or t
ttattaaagaggaganttaactatgagaggatcgcataccatcaccatcacggatcctatttaggtgacactatagaatcgtcgacccacgcgtccgcccacgcgtccgctttcctgcagacctattcccacgaggtctccctcactgcggactcgcggaagagccacctgattttcccccagcccaactatgcggacacgctcatcagccaggagagctgtgagaaaaaggattttttatcagcgcctcantntctactcgaagaagaaagagaagaaacgttttctcagcaagccccgcccaacacggactggcgtttctctcaggcccagagacccggcaccagcggctcccaaaatggcgatgacaccggcacctggcccaacaaccagtttgacacagagatgctgcaagccatgatcttggcgtccgccagtgaagctgctgatgggagctccaccctgggagggggtgccggcaccatgggattgagcgcccgctacggaccccagttcaccctgcagcacgtgcccgactaccgccagaatgtctacatcccaggcagcaatgccacactgaccaacgcagctggcaagcgggatggcaaggccccagcaggtggcaatggcaacaagaagaagtcgggcaagaaggagaagaagtaacatgggaggccaggccaagagccacagggcgggcctnttcccaaccagcccagcttnttcttacctgcaccccaaggcctnanagtttcaggggctaacccccaanaatactggtaggggncaaaggccatgcttcccctttgggaaacanaaacaaggggcccagtnaggaacttanccctttccccccaaggggggtggaa

SEQ ID NO: 116 - DNA, 891 bp, Homo Sapiens
  misc_feature (3)..(4): n is a, c, g, or t
  misc_feature (255)..(255): n is a, c, g, or t
  misc_feature (257)..(257): n is a, c, g, or t
  misc_feature (296)..(296): n is a, c, g, or t
  misc_feature (300)..(300): n is a, c, g, or t
  misc_feature (522)..(522): n is a, c, g, or t
  misc_feature (528)..(528): n is a, c, g, or t
  misc_feature (561)..(561): n is a, c, g, or t
  misc_feature (571)..(571): n is a, c, g, or t
  misc_feature (609)..(609): n is a, c, g, or t
  misc_feature (622)..(622): n is a, c, g, or t
  misc_feature (628)..(628): n is a, c, g, or t
  misc_feature (635)..(635): n is a, c, g, or t
  misc_feature (645)..(645): n is a, c, g, or t
  misc_feature (657)..(657): n is a, c, g, or t
  misc_feature (660)..(660): n is a, c, g, or t
  misc_feature (672)..(672): n is a, c, g, or t
  misc_feature (674)..(675): n is a, c, g, or t
  misc_feature (686)..(686): n is a, c, g, or t
  misc_feature (698)..(698): n is a, c, g, or t
  misc_feature (700)..(700): n is a, c, g, or t
  misc_feature (728)..(728): n is a, c, g, or t
  misc_feature (748)..(748): n is a, c, g, or t
  misc_feature (756)..(756): n is a, c, g, or t
  misc_feature (763)..(763): n is a, c, g, or t
  misc_feature (776)..(776): n is a, c, g, or t
  misc_feature (783)..(783): n is a, c, g, or t
  misc_feature (785)..(785): n is a, c, g, or t
  misc_feature (787)..(787): n is a, c, g, or t
  misc_feature (792)..(792): n is a, c, g, or t
  misc_feature (796)..(797): n is a, c, g, or t
  misc_feature (808)..(808): n is a, c, g, or t
  misc_feature (810)..(810): n is a, c, g, or t
  misc_feature (816)..(816): n is a, c, g, or t
  misc_feature (827)..(827): n is a, c, g, or t
  misc_feature (830)..(830): n is a, c, g, or t
  misc_feature (833)..(833): n is a, c, g, or t
  misc_feature (838)..(838): n is a, c, g, or t
  misc_feature (842)..(842): n is a, c, g, or t
  misc_feature (844)..(844): n is a, c, g, or t
  misc_feature (857)..(857): n is a, c, g, or t
  misc_feature (865)..(866): n is a, c, g, or t
  misc_feature (875)..(875): n is a, c, g, or t
  misc_feature (883)..(883): n is a, c, g, or t
  misc_feature (891)..(891): n is a, c, g, or t
ttnnttaaagaggagaaattaactatgagaggatcgcatcaccatcaccatcacggatcctatttaggtgacactatagaatcgtcgacccacgcgtccggtcgggcccagggggaacaggcacgagctgaactcttgagcctaacccagatggagagggagaagattgtttgggagtttgagcagctgtatcactccttaaaggagcatgagtatcgcctcctggcccgccttgaggagctagacttggccatntncaatagcatcaatggtgccatcacccagttctcttgcancatntcccacctcagcagcctgatcgctcagctagaagagaagcagcagcagcccaccagggagctcctgcaggacattggggacacattgagcagggcttgaaagaatcaggattcctgaaccttggatcacacctccagatttgcaagagaaaatccacatttttgcccaaaaatgtctatttcttgacggagagtctaaagcagttcacagaaaaaatgcagncagatntggagaaaatccaagaattaagagaggctcaantatactcagnggacgtgactctggacccagacacgggccctaccccanccctggatccctntttganaaatctngggggaaggngccgggtacagnttnccctcccaacangnncctgccttganaaaccccccggnanggttcaaacctggtttcccctgggggcnttggggcctctcccttggcnttaatggncgggganacaatttttgggnagggtanangntgggnaaannaaagcccaggngncccccnagggggttcgnganaanctaangggncnaaaaaaggggggngacccccnnccccccccnaaaagggnttttgggn

SEQ ID NO: 117 - DNA, 871 bp, Homo Sapiens
  misc_feature (5)..(5): n is a, c, g, or t
  misc_feature (13)..(13): n is a, c, g, or t
  misc_feature (17)..(17): n is a, c, g, or t
  misc_feature (20)..(20): n is a, c, g, or t
  misc_feature (25)..(27): n is a, c, g, or t
  misc_feature (29)..(29): n is a, c, g, or t
  misc_feature (77)..(77): n is a, c, g, or t
  misc_feature (155)..(155): n is a, c, g, or t
  misc_feature (259)..(260): n is a, c, g, or t
  misc_feature (268)..(268): n is a, c, g, or t
  misc_feature (306)..(306): n is a, c, g, or t
  misc_feature (321)..(322): n is a, c, g, or t
  misc_feature (324)..(325): n is a, c, g, or t
  misc_feature (379)..(380): n is a, c, g, or t
  misc_feature (698)..(698): n is a, c, g, or t
  misc_feature (738)..(738): n is a, c, g, or t
  misc_feature (741)..(741): n is a, c, g, or t
  misc_feature (743)..(743): n is a, c, g, or t
  misc_feature (757)..(757): n is a, c, g, or t
  misc_feature (772)..(772): n is a, c, g, or t
  misc_feature (796)..(796): n is a, c, g, or t
  misc_feature (800)..(800): n is a, c, g, or t
  misc_feature (807)..(807): n is a, c, g, or t
  misc_feature (826)..(826): n is a, c, g, or t
  misc_feature (829)..(829): n is a, c, g, or t
  misc_feature (837)..(838): n is a, c, g, or t
  misc_feature (842)..(842): n is a, c, g, or t
  misc_feature (855)..(855): n is a, c, g, or t
  misc_feature (858)..(858): n is a, c, g, or t
  misc_feature (866)..(866): n is a, c, g, or t
aaaancccaattnttanagnggagnnntnactctgagaggatcgcatcaccatcaccatcacggatcctatttaggngacactatagaatcgtcgacccacgcgtccgattttaaatccagctccatacaacgctccgccgccgctgctgccgcnacccggactgcgcgccagcacccccctgccgacagctccgtcactatggaggatatgaacgagtacagcaatatagaggaattcgcagagggatccaagatcanntttttttngaatcagcaggatgacggtaaaatgtttattggagggnggagctgggatacanncnnaaaagatctgacagagtacttgtctcgatttggggaagttgtagactgcacaannaaaacagatccagtcactgggagatcaagaggatttggatttgtgcttttcaaagatgctgctagtgttgataaggttttggaactgaaagaacacaaactggatggcaaattgatagatcccaaaagggccaaagctttaaaagggaaagaacctcccaaaaaggtttttgtgggtggattgagcccggatacttctgaagaacaaattaaagaatattttggagcctttggagagattgaaaatattgaacttcccatgggtacaaaaacaaatgaaaagaagaggattttgttttatcacgtatactgatgaaanagccagcaaaaaaaaatgttagaaagcagataccatcaanttngnttctgggaaggggngaaatcaaagttgcncaccccaaaaaggttttttaggcnggcnaccagcnaccaccaaaaagggggaanagnggctgcanntggngggacaagggggnccnaggggtcngggcc

SEQ ID NO: 118 - DNA, 203 bp, Homo Sapiens
  misc_feature (2)..(2): n is a, c, g, or t
  misc_feature (6)..(6): n is a, c, g, or t
  misc_feature (12)..(12): n is a, c, g, or t
  misc_feature (18)..(18): n is a, c, g, or t
  misc_feature (25)..(26): n is a, c, g, or t
  misc_feature (37)..(38): n is a, c, g, or t
  misc_feature (45)..(45): n is a, c, g, or t
  misc_feature (87)..(87): n is a, c, g, or t
  misc_feature (92)..(92): n is a, c, g, or t
  misc_feature (101)..(101): n is a, c, g, or t
  misc_feature (106)..(106): n is a, c, g, or t
  misc_feature (108)..(109): n is a, c, g, or t
  misc_feature (119)..(119): n is a, c, g, or t
  misc_feature (122)..(122): n is a, c, g, or t
  misc_feature (129)..(129): n is a, c, g, or t
  misc_feature (131)..(131): n is a, c, g, or t
  misc_feature (151)..(151): n is a, c, g, or t
  misc_feature (158)..(158): n is a, c, g, or t
  misc_feature (163)..(166): n is a, c, g, or t
  misc_feature (169)..(169): n is a, c, g, or t
  misc_feature (172)..(172): n is a, c, g, or t
  misc_feature (183)..(183): n is a, c, g, or t
  misc_feature (201)..(202): n is a, c, g, or t
gntcgnaggganaaaaanccccttnntggggggagannaaacccncaccataccatacggatcctatggaggggacactatagaaangcccncccacgcgnccggngnncccaagcgcnggnccagggncnccacaccggggccgcgcccnaaggagngggannnncgncgnggcacacctcnggccctacagacacaaanna

SEQ ID NO: 119 - DNA, 653 bp, Homo Sapiens
  misc_feature (7)..(7): n is a, c, g, or t
  misc_feature (23)..(24): n is a, c, g, or t
  misc_feature (82)..(82): n is a, c, g, or t
  misc_feature (100)..(100): n is a, c, g, or t
  misc_feature (122)..(122): n is a, c, g, or t
  misc_feature (124)..(124): n is a, c, g, or t
  misc_feature (139)..(139): n is a, c, g, or t
  misc_feature (145)..(145): n is a, c, g, or t
  misc_feature (152)..(153): n is a, c, g, or t
  misc_feature (176)..(177): n is a, c, g, or t
  misc_feature (182)..(182): n is a, c, g, or t
  misc_feature (189)..(189): n is a, c, g, or t
  misc_feature (195)..(195): n is a, c, g, or t
  misc_feature (201)..(201): n is a, c, g, or t
  misc_feature (207)..(207): n is a, c, g, or t
  misc_feature (212)..(213): n is a, c, g, or t
  misc_feature (216)..(216): n is a, c, g, or t
  misc_feature (219)..(219): n is a, c, g, or t
  misc_feature (224)..(224): n is a, c, g, or t
  misc_feature (230)..(231): n is a, c, g, or t
  misc_feature (242)..(242): n is a, c, g, or t
  misc_feature (249)..(249): n is a, c, g, or t
  misc_feature (253)..(253): n is a, c, g, or t
  misc_feature (272)..(272): n is a, c, g, or t
  misc_feature (278)..(278): n is a, c, g, or t
  misc_feature (286)..(286): n is a, c, g, or t
  misc_feature (311)..(311): n is a, c, g, or t
  misc_feature (313)..(313): n is a, c, g, or t
  misc_feature (317)..(317): n is a, c, g, or t
  misc_feature (327)..(327): n is a, c, g, or t
  misc_feature (365)..(365): n is a, c, g, or t
  misc_feature (368)..(368): n is a, c, g, or t
  misc_feature (376)..(376): n is a, c, g, or t
  misc_feature (378)..(378): n is a, c, g, or t
  misc_feature (383)..(383): n is a, c, g, or t
  misc_feature (407)..(407): n is a, c, g, or t
  misc_feature (416)..(416): n is a, c, g, or t
  misc_feature (425)..(425): n is a, c, g, or t
  misc_feature (439)..(439): n is a, c, g, or t
  misc_feature (455)..(455): n is a, c, g, or t
  misc_feature (494)..(494): n is a, c, g, or t
  misc_feature (502)..(502): n is a, c, g, or t
  misc_feature (506)..(507): n is a, c, g, or t
  misc_feature (533)..(533): n is a, c, g, or t
  misc_feature (542)..(542): n is a, c, g, or t
  misc_feature (545)..(546): n is a, c, g, or t
  misc_feature (554)..(555): n is a, c, g, or t
  misc_feature (558)..(559): n is a, c, g, or t
  misc_feature (582)..(582): n is a, c, g, or t
  misc_feature (590)..(590): n is a, c, g, or t
  misc_feature (593)..(593): n is a, c, g, or t
  misc_feature (596)..(596): n is a, c, g, or t
  misc_feature (609)..(609): n is a, c, g, or t
  misc_feature (617)..(617): n is a, c, g, or t
  misc_feature (627)..(627): n is a, c, g, or t
  misc_feature (635)..(636): n is a, c, g, or t
  misc_feature (639)..(639): n is a, c, g, or t
  misc_feature (644)..(644): n is a, c, g, or t
agctaanaagaaaaaacccgctnntgggggtgaaaaaacccaaaccatcaccatcacggatcctagggaggggacactatanaaacgccgacccacgcgnccgcccacgcgtccgagacggncncggaggcaccacctntgctgntcagcgnngaagaagagaaggaggcacaacnnggagngaagccngagganaaaaangaaganagtgnnttnttntcatnaaaagnngggagaacggngggggcngcgncagaaaaggaaggacccgngactangatccgcncaggaaacagtcaagcaccccggangnattncccccaccanccccaggggacaaaggaaccaagcctagaaccaaaacngcncttagctngngggangaggaagaggacaaaacggaagancaaaacacnatccaggcnccacagaaagaagnaggaaagggctgcgancctggcgcccaccccaagagcacagggggctcccaggangaagagcngccnnccagccacaagccccaaaaggacaangccccaganggnngacccctnnggnnggccccaaaaaaaccaagcctgncagagccnagngcngggagccccggcnggggccgncccaagacgncgaccctnncanccccngccaaggcc

SEQ ID NO: 120 - DNA, 879 bp, Homo Sapiens
  misc_feature (19)..(19): n is a, c, g, or t
  misc_feature (39)..(39): n is a, c, g, or t
  misc_feature (249)..(251): n is a, c, g, or t
  misc_feature (561)..(561): n is a, c, g, or t
  misc_feature (590)..(590): n is a, c, g, or t
  misc_feature (610)..(610): n is a, c, g, or t
  misc_feature (618)..(618): n is a, c, g, or t
  misc_feature (638)..(638): n is a, c, g, or t
  misc_feature (652)..(652): n is a, c, g, or t
  misc_feature (687)..(687): n is a, c, g, or t
  misc_feature (693)..(693): n is a, c, g, or t
  misc_feature (698)..(698): n is a, c, g, or t
  misc_feature (710)..(710): n is a, c, g, or t
  misc_feature (720)..(720): n is a, c, g, or t
  misc_feature (724)..(724): n is a, c, g, or t
  misc_feature (727)..(727): n is a, c, g, or t
  misc_feature (730)..(730): n is a, c, g, or t
  misc_feature (737)..(737): n is a, c, g, or t
  misc_feature (751)..(751): n is a, c, g, or t
  misc_feature (777)..(777): n is a, c, g, or t
  misc_feature (784)..(784): n is a, c, g, or t
  misc_feature (790)..(790): n is a, c, g, or t
  misc_feature (816)..(816): n is a, c, g, or t
  misc_feature (818)..(818): n is a, c, g, or t
  misc_feature (822)..(823): n is a, c, g, or t
  misc_feature (825)..(825): n is a, c, g, or t
  misc_feature (845)..(845): n is a, c, g, or t
  misc_feature (847)..(847): n is a, c, g, or t
  misc_feature (866)..(866): n is a, c, g, or t
  misc_feature (870)..(870): n is a, c, g, or t
  misc_feature (874)..(874): n is a, c, g, or t
ttatttaagaggagaaatnactctgagaggatcgatacntcacatcacggatcctatttaggtgacactatagaatcgtcgacccacgcgtccgcccacgcgtccgcccacgcgtccggttttgtggaaaccttggacagccccaccatggaggcctacgtgactgagaccgctgaggaggtgctactggtgcggaatctgaactcggatgatcaggctgttgtgctgaaggccctgagattggcgccnnnggggcgtctgcgaagggacgggctgcgggccctcagctccctgctcgtccatggcaacaacaaggtcatggctgctgtcagcacccagctccggagcctgtcactgggccctaccttccgggagagggccctcctgtgcttcctggaccagctggaggatgaggacgtgcagactcgagtggctggctgcctggccctaggctgcatcaaggctcccgagggcattgagccccttggtgtacctctgccaaactgacacaaaagctgtgagggaagctgcccggcaaagcctacagcagtgtggaagaanagggacagtctgcccatcgacggctggangagtccctggacgcccttgncccgcatntttgggcctggcagcatggncagcacagattttnaactattcacccatggggttcctggggcccctttncccccnttttnagggctcaccangcactggcangganggnaanggctggnttcaaatacccctnccccaaagattctagcaatgaaaatntaatatntttttntgttgccctggggttggaaaaaaaangncctnnanaaaaggcctccaaccttggntnaaaaattccttggcaaaanaaangttnggggt

SEQ ID NO: 121 - DNA, 659 bp, Homo Sapiens
  misc_feature (544)..(544): n is a, c, g, or t
  misc_feature (578)..(578): n is a, c, g, or t
  misc_feature (591)..(591): n is a, c, g, or t
  misc_feature (605)..(605): n is a, c, g, or t
  misc_feature (609)..(609): n is a, c, g, or t
  misc_feature (635)..(635): n is a, c, g, or t
  misc_feature (643)..(643): n is a, c, g, or t
  misc_feature (647)..(647): n is a, c, g, or t
  misc_feature (658)..(658): n is a, c, g, or t
tcgagaaaatataaaaaattatttgctttgtgagcggatacaatataatagattaattgtgagcggataacaatttacacagaattattaaagaggagaaattaactatgagaggatcgcatcaccatcaccatcacggatcctatttaggtgacactatagaatcgtcgacccacgcgtccggtcgccccagcccgccgggggcgcagcgcccgagccgcggccctcgagacgggaccgagagcatcatgggcagcactgtcccgcgctccgcctccgtgctgcttctgctgctgctcctgcgccgggccgagcagccctgcggggccgagctcaccttcgagctgccggacaacgccaagcagtgcttccacgaggaggtggagcagggcgtgaagttctccctggattaccaggtcatcactggaggccactacgatgttgactgctatgtagaggacccccaggggaacaccatctacagagaaacgaagaagcagtacgacagcttcacgtaccgggcttgaagtcaagggcgtttatnagttttgcttcagtaatgagtttttcaccttctntcacaagaccgtntactttgacttttnaagngggcgatgagccttccatttttccanacatgggnacanggtcacagctnt

SEQ ID NO: 122 - DNA, 820 bp, Homo Sapiens
  misc_feature (18)..(18): n is a, c, g, or t
  misc_feature (42)..(42): n is a, c, g, or t
  misc_feature (650)..(650): n is a, c, g, or t
  misc_feature (703)..(703): n is a, c, g, or t
  misc_feature (746)..(746): n is a, c, g, or t
  misc_feature (762)..(762): n is a, c, g, or t
  misc_feature (767)..(767): n is a, c, g, or t
  misc_feature (770)..(770): n is a, c, g, or t
  misc_feature (791)..(792): n is a, c, g, or t
  misc_feature (799)..(820): n is a, c, g, or t
ttattaagaggagaaatnactctgagaggatcgatacctacntcacggatcctatttaggtgacactatagaatcgtcgacccacgcgtccgcaatggtggagaagaaaacttcggttcgctcccaggaccccgggcagcggcgggtgctggaccgggctgcccggcagcgtcgcatcaaccggcagctggaggccctggagaatgacaacttccaggatgacccccacgcgggactccctcagctcggcaagagactgcctcagtttgatgacgatgcggacactggaaagaaaaagaagaaaacccgaggtgatcattttaaacttcgcttccgaaaaaactttcaggccctgttggaggagcagaacttgagtgtggccgagggccctaactacctgacggcctgtgcgggacccccatcgcggccccagcgccccttctgtgctgtctgtggcttcccatccccctacacctgtgtcagctgcggtgcccggtactgcactgtgcgctgtctggggacccaccaggagaccaggtgtctgaagtggactgtgtgagcctgggcattcccagagaggaagggccgctgtgcactgcccggccttcagaaagacagaatttcatcacccaatgcagggggagctcttnctggaccaagggaggagccgctcattcacccaacaaaactgggtcttatctgncaggaaagaccagcctcacttctgggaactgtctggcaggtangctgggcccccccagngctgntanaataaaaagcctcgggccggnnaaaaaannnnnnnnnnnnnnnnnnnnnn

SEQ ID NO: 123 - DNA, 453 bp, Homo Sapiens
  misc_feature (3)..(3): n is a, c, g, or t
  misc_feature (8)..(11): n is a, c, g, or t
  misc_feature (13)..(13): n is a, c, g, or t
  misc_feature (17)..(17): n is a, c, g, or t
  misc_feature (27)..(27): n is a, c, g, or t
ttnaaaannnntntaantccccaattnttaaagcaggagaaattaactatgagaggatcgcatcaccatcaccatcacggatcctatttaggtgacactatagaatcgtcgacccacgcgtccgcgacctacgcacacgagaacatgcctctcgcaaaggatctccttcatccctctccagaagaggagaagaggaaacacaagaagaaacgcctggtgcagagccccaattcctacttcatggatgtgaaatgcccaggatgctataaaatcaccacggtctttagccatgcacaaacggtagttttgtgtgttggctgctccactgtcctctgccagcctacaggaggaaaagcaaggcttacagaaggatgttccttcaggaggaagcagcactaaaagcactctgagtcaagatgagtgggaaaccatctcaataaacacattttggat

SEQ ID NO: 124 - DNA, 544 bp, Homo Sapiens
  misc_feature (1)..(1): n is a, c, g, or t
  misc_feature (4)..(4): n is a, c, g, or t
naantagagaaattactatgagaggatcgcatcaccattcaccatcacggaatcctatttaggtgacactatagaatcgtcgacccacgcgtccgctgagaccgtcttcattgtggagatctccctgacatgcaagaacagggtccagaacatggctctctatgctgacgtcggtggaaaacaattccctgtcactcgaggccaggatgtggggcgttatcaggtgtcctggagcctggaccacaagagcgcccacgcaggcacctatgaggttagattcttcgacgaggagtcctacagcctcctcaggaaggctcagaggaataacgaggacatttccatcatcccgcctctgtttacagtcagcgtggaccatcggggcacttggaacgggccctgggtgtccactgaggtgctggctgcggcgatcggccttgtgatctactacttggccttcagtgcgaagagccacatccaggcctgagggcggcaccccagccctgcccttgcttccttcaataaacatcacaggacctgggactgc

SEQ ID NO: 125 - DNA, 1129 bp, Homo Sapiens
  misc_feature (925)..(925): n is a, c, g, or t
  misc_feature (979)..(979): n is a, c, g, or t
  misc_feature (989)..(989): n is a, c, g, or t
  misc_feature (995)..(995): n is a, c, g, or t
  misc_feature (1001)..(1001): n is a, c, g, or t
  misc_feature (1003)..(1003): n is a, c, g, or t
  misc_feature (1011)..(1011): n is a, c, g, or t
  misc_feature (1014)..(1014): n is a, c, g, or t
  misc_feature (1035)..(1035): n is a, c, g, or t
  misc_feature (1046)..(1046): n is a, c, g, or t
  misc_feature (1077)..(1077): n is a, c, g, or t
  misc_feature (1087)..(1087): n is a, c, g, or t
  misc_feature (1108)..(1108): n is a, c, g, or t
  misc_feature (1111)..(1111): n is a, c, g, or t
  misc_feature (1121)..(1121): n is a, c, g, or t
tagagaaattactatgagaggatcgcatcaccatcaccatcacggatcctatttaggtgacactatagaatcgtcgacccacgcgtccggcaaagcatatgagcggaatgagttgttcctgccgggccgcatggcctatgtggtagacctggatgatgagtatgctgacacagatatccccaccactcttatccgcagcaaggctgattgccccaccatggaggcccagaccacactgaccacaaatgacattgtcattagcaagctgacccagatcctttcatacctgaggcagggaacccgtaacaagaagcttaagaagaaggataaagggaagctggaagagaagaaacctcctgaggctgacatgaatatttttgaagacattggggattacgtaccctccacaaccaagacacctcgggacaaggagcgggagagatatcgggaacgggagcgtgatcgggaaagagacagagaccgtgaccgagagcgagagcgagaacgagatcgggaacgagagcgagagcgggaccgagagagagaagaggaaaagaagagacacagctactttgagaagccaaaagtagatgatgagcccatggacgttgacaaaggacctgggtctaccaaggagttgatcaagtccatcaatgaaaagtttgctgggtctgctggctgggaaggcacagaatcgctgaagaagccagaagacaaaaagcagctgggagatttctttggcatgtccaacagttatgcagagtgctacccagccacgatggatgacatggctgtggatagtgatgaggaggtggattatagcaaaatggaccagggtaacaagaaggggcccttaggccgttgggactttgatacccaggaagaatacagcgagtatatgaacaacaaagaagctttgccccanggctgcattccagtatggtatcaaaatgtctgaagggcggaaaaccaggcgctncagggaaccnatgacnaagcanancttgatcnccngtggaaaaaaattatgcatcnttgaaaaaagnaaaaaatggaactgatgggttgaatccaaanaccaaatctntcctttttccacccgaatgcnccnagggtttgcnccccggtt

SEQ ID NO: 126 - DNA, 1174 bp, Homo Sapiens
  misc_feature (917)..(917): n is a, c, g, or t
  misc_feature (998)..(998): n is a, c, g, or t
  misc_feature (1002)..(1002): n is a, c, g, or t
  misc_feature (1005)..(1005): n is a, c, g, or t
  misc_feature (1026)..(1026): n is a, c, g, or t
  misc_feature (1045)..(1045): n is a, c, g, or t
  misc_feature (1056)..(1056): n is a, c, g, or t
  misc_feature (1063)..(1063): n is a, c, g, or t
  misc_feature (1080)..(1081): n is a, c, g, or t
  misc_feature (1083)..(1083): n is a, c, g, or t
  misc_feature (1095)..(1096): n is a, c, g, or t
  misc_feature (1102)..(1102): n is a, c, g, or t
  misc_feature (1104)..(1104): n is a, c, g, or t
  misc_feature (1124)..(1124): n is a, c, g, or t
  misc_feature (1127)..(1127): n is a, c, g, or t
  misc_feature (1129)..(1129): n is a, c, g, or t
  misc_feature (1170)..(1170): n is a, c, g, or t
tagagaaattactatgagaggatcgcatcaccatcaccatcacggatcctatttaggtgacactatagaatcgtcgacccacgcgtccgcccacgcgtccgcagccatggagcaggcacctccggaccccgagcggcagctccagccggcgcccttggagccgctgggctccccagacgctgggctgggggctgcggtcggcaaggaagcggagggggccggagaagagagctctggggtcgacacgatgacacacaataatttttggttgaagaagatagaaatcagtgtttcagaagcagaaaaacgaactggaagaaatgccatgaacatgcaagaaacatatactgcttacctcattgaaacaaggtcagttgaacataccgatggtcagagtgtcctaacagactcactatggcggcgatatagtgaatttgagttgttgagaagctaccttttagtttactatccacatattgttgtgccacctctgccagaaaaacgggcagaatttgtttggcataaactctctgctgacaacatggatccagattttgtggagaggcgacggattggtttagaaaactttctcttgaggattgcttcacatcccatcctttgtagagacaaaatcttctatctgtttttaacacaggaaggtaactggaaggagactgtgaatgaaactgggtttcagctgaaggcagactccaggttaaaagcgcttaatgcaacattcagagtgaaaaacccagacaagagatttactgaccttaagcactatagtgatgaactgcagtctgtcatctcacatcttcttcgagtcagagctagagtagcagatcgactctatggtgtatataaagtacatgggaattatggtcgagttttcagtgaatggagtgccataaaaaaanaaatgggtgatggactgcaaagtgctggtcatcatatggatgtgtatgcatcttctattgatgatattttggaagatgaanaacnttntgcaaatcagtttaaagagtntctttttttatgcaaaacnttgcgggctgngggcagnaaacttgaacttttgcnntntgacttggaaannggtgcncnggacttaacctccaaaaacnccntngggggaactggtaactgggactgggaaaaattttttttganggaa

SEQ ID NO: 127 - DNA, 424 bp, Homo Sapiens
tagagaaattactatgagaggatcgcatcaccatcaccatcacggatcctatttaggtgacactatagaatcgtcgacccacgcgtccgacagcggagaccctgttaactactacgttgacactgctgtgcgccacgtgttgctcagacagggtgtgctgggcatcaaggtgaagatcatgctgccctgggacccaactggtaagattggccctaagaagcccctgcctgaccacgtgagcattgtggaacccaaagatgagatactgcccaccacccccatctcagaacagaagggtgggaagccagagccgcctgccatgccccagccagtccccacagcataacagggtctccttggcagctgtattctggagtctggatgttgctctctaaagacctttaataaaattttgtacaaagac

SEQ ID NO: 128 - DNA, 1215 bp, Homo Sapiens
  misc_feature (1)..(1): n is a, c, g, or t
  misc_feature (831)..(831): n is a, c, g, or t
  misc_feature (857)..(857): n is a, c, g, or t
  misc_feature (902)..(902): n is a, c, g, or t
  misc_feature (934)..(934): n is a, c, g, or t
  misc_feature (946)..(946): n is a, c, g, or t
  misc_feature (949)..(949): n is a, c, g, or t
  misc_feature (966)..(966): n is a, c, g, or t
  misc_feature (979)..(979): n is a, c, g, or t
  misc_feature (984)..(984): n is a, c, g, or t
  misc_feature (990)..(990): n is a, c, g, or t
  misc_feature (993)..(993): n is a, c, g, or t
  misc_feature (1006)..(1006): n is a, c, g, or t
  misc_feature (1013)..(1013): n is a, c, g, or t
  misc_feature (1018)..(1018): n is a, c, g, or t
  misc_feature (1032)..(1032): n is a, c, g, or t
  misc_feature (1036)..(1036): n is a, c, g, or t
  misc_feature (1066)..(1066): n is a, c, g, or t
  misc_feature (1070)..(1071): n is a, c, g, or t
  misc_feature (1076)..(1076): n is a, c, g, or t
  misc_feature (1085)..(1085): n is a, c, g, or t
  misc_feature (1098)..(1098): n is a, c, g, or t
  misc_feature (1100)..(1100): n is a, c, g, or t
  misc_feature (1102)..(1102): n is a, c, g, or t
  misc_feature (1105)..(1105): n is a, c, g, or t
  misc_feature (1110)..(1110): n is a, c, g, or t
  misc_feature (1117)..(1117): n is a, c, g, or t
  misc_feature (1124)..(1124): n is a, c, g, or t
  misc_feature (1130)..(1130): n is a, c, g, or t
  misc_feature (1138)..(1138): n is a, c, g, or t
  misc_feature (1148)..(1148): n is a, c, g, or t
  misc_feature (1151)..(1151): n is a, c, g, or t
  misc_feature (1156)..(1156): n is a, c, g, or t
  misc_feature (1161)..(1161): n is a, c, g, or t
  misc_feature (1166)..(1166): n is a, c, g, or t
  misc_feature (1193)..(1193): n is a, c, g, or t
  misc_feature (1202)..(1202): n is a, c, g, or t
  misc_feature (1212)..(1212): n is a, c, g, or t
naattagagaaaattactatgagaggatcgcatcaccatcaccatcacggatcctatttaggtgacactatagaatcgtcgacccacgcgtccgccccctcgggctgcggggaacagaacatgatcggcatgacgcccacggtcatcgctgtgcattacctggatgaaacggagcagtgggagaagttcggcctagagaagcggcagggggccttggagctcatcaagaaggggtacacccagcagctggccttcagacaacccagctctgcctttgcggccttcgtgaaacgggcacccagcacctggctgaccgcctacgtggtcaaggtcttctctctggctgtcaacctcatcgccatcgactcccaagtcctctgcggggctgttaaatggctgatcctggagaagcagaagcccgacggggtcttccaggaggatgcgcccgtgatacaccaagaaatgattggtggattacggaacaacaacgagaaagacatggccctcacggcctttgttctcatctcgctgcaggaggctaaagatatttgcgaggagcaggtcaacagcctgccaggcagcatcactaaagcaggagacttccttgaagccaactacatgaacctacagagatcctacactgtggccattgctggctatgctctggcccagatgggcaggctgaaggggcctcttcttaacaaatttctgaccacagccaaagataagaaccgctgggaggaccctggtaagcagctctacaacgtggaggccacatcctatgccctcttggccctactgcagctaaaagactttgactttgtgcctccngtcgtgcgttggctcaatgaacaganatactacggtggtggctatggctctacccaggccaccttcatggngttccaagccttggctcaataccaaaaggacncccctgaccacnagnaactgaaccttgatgtntccctccaaatgnccagncgcagntcnaagatcacccacngtatccnctggnaaatctgccacctnctgngatcaaaaaaaccaaggaaaatgagggttnccanntcccnccctgaagnaaaagccaaggcncntntcnggggngaaaatntaccatnttaagnccaaaaanaactccctgnaanaattncaccncaggncccataaacccccccggaaaaaaaaangccccgganccaaaaattnttt

SEQ ID NO: 129 - DNA, 1184 bp, Homo Sapiens
  misc_feature (887)..(887): n is a, c, g, or t
  misc_feature (929)..(929): n is a, c, g, or t
  misc_feature (939)..(939): n is a, c, g, or t
  misc_feature (944)..(944): n is a, c, g, or t
  misc_feature (947)..(947): n is a, c, g, or t
  misc_feature (954)..(954): n is a, c, g, or t
  misc_feature (975)..(975): n is a, c, g, or t
  misc_feature (981)..(981): n is a, c, g, or t
  misc_feature (983)..(983): n is a, c, g, or t
  misc_feature (993)..(993): n is a, c, g, or t
  misc_feature (998)..(998): n is a, c, g, or t
  misc_feature (1003)..(1003): n is a, c, g, or t
  misc_feature (1018)..(1018): n is a, c, g, or t
  misc_feature (1022)..(1022): n is a, c, g, or t
  misc_feature (1025)..(1025): n is a, c, g, or t
  misc_feature (1037)..(1037): n is a, c, g, or t
  misc_feature (1042)..(1042): n is a, c, g, or t
  misc_feature (1054)..(1054): n is a, c, g, or t
  misc_feature (1067)..(1067): n is a, c, g, or t
  misc_feature (1085)..(1085): n is a, c, g, or t
  misc_feature (1101)..(1101): n is a, c, g, or t
  misc_feature (1109)..(1109): n is a, c, g, or t
  misc_feature (1112)..(1112): n is a, c, g, or t
  misc_feature (1116)..(1116): n is a, c, g, or t
  misc_feature (1119)..(1119): n is a, c, g, or t
  misc_feature (1122)..(1122): n is a, c, g, or t
  misc_feature (1125)..(1125): n is a, c, g, or t
  misc_feature (1128)..(1128): n is a, c, g, or t
  misc_feature (1133)..(1133): n is a, c, g, or t
  misc_feature (1135)..(1135): n is a, c, g, or t
  misc_feature (1148)..(1148): n is a, c, g, or t
  misc_feature (1153)..(1153): n is a, c, g, or t
  misc_feature (1157)..(1158): n is a, c, g, or t
  misc_feature (1165)..(1165): n is a, c, g, or t
  misc_feature (1167)..(1167): n is a, c, g, or t
  misc_feature (1175)..(1175): n is a, c, g, or t
  misc_feature (1180)..(1180): n is a, c, g, or t
tagagaaattactatgagaggatcgcatcaccatcaccatcacggatcctatttaggtgacactatagaatcgtcgacccacgcgtccgcttctccaagatggcggcgatcggcggcgttgaggcgggatccgggcgagccgagtgaagattgttttgatggtgatcatacctttgaggacataggacttgcagctggccgaagccaacgagagaaaaaacgttcttacaaagattttttaagggaagaggaagaaattgctgctcaggtcaggaattcttccaagaagaagttgaaggatagtgaactttacttcttggggacggacacacacaagaagaagaggaagcactcctctgatgattactactatggagatatttcgtctttggaatcgtcacagaagaaaaagaaaaagtccagcccacagtctactgatacagctatggacctgttgaaagctatcacttccccactggcagcaggctccaagccctccaaaaagactggggagaaatcctctggctcttcaagccattcggagagtaaaaaggagcaccacaggaagaaagtcagtggaagcagtggggaactacccctagaggatggtgtctcccacaaatcgaaaaaaatgaaacctctctatgtgaacacagagacactgacccttcgggagcctgatggtttaaaaatgaaacttattctgtcaccaaaggagaagggaagcagctctgttgatgaggagtcttttcaatatccctcccaacaagcgactgtgaaaaaatcctcaaagaaatcagctcgggatgagcagggtgctttactcctaggacatgagttacagagctttctgaaaacagcccggaaaaagcacaagtcatcctcanacgcacattcatctcctggccctgaaggctgtgggtctgacncctcccagtncgcanagnccccagngctaaccttgatctttcaggnctggancnattctggtanaatcnactcntcctctggtgggganctanagnctggggattagngatanatgattcttacngagaatccagaanaaaagaagtccaagaaangcaaaagaaaaagacnggggaaanctnaagnaanccnccnccngtccnanaaatttagacttncgccngccnngggaagncnaggaattnggccncccc

SEQ ID NO: 130 - DNA, 560 bp, Homo Sapiens
  misc_feature (50)..(50): n is a, c, g, or t
  misc_feature (73)..(73): n is a, c, g, or t
  misc_feature (295)..(295): n is a, c, g, or t
  misc_feature (425)..(425): n is a, c, g, or t
  misc_feature (435)..(435): n is a, c, g, or t
  misc_feature (472)..(472): n is a, c, g, or t
  misc_feature (475)..(475): n is a, c, g, or t
  misc_feature (484)..(484): n is a, c, g, or t
  misc_feature (487)..(487): n is a, c, g, or t
  misc_feature (496)..(499): n is a, c, g, or t
  misc_feature (514)..(514): n is a, c, g, or t
  misc_feature (516)..(516): n is a, c, g, or t
  misc_feature (532)..(532): n is a, c, g, or t
  misc_feature (545)..(545): n is a, c, g, or t
  misc_feature (549)..(550): n is a, c, g, or t
  misc_feature (552)..(554): n is a, c, g, or t
  misc_feature (556)..(556): n is a, c, g, or t
  misc_feature (559)..(559): n is a, c, g, or t
taatagagaaattactatggagaggatcgcatcaccatcaccatcacggnatcctatttaggtgacactatanaatcgtcgacccacgcgctccgcgggacgcgcttggccttgcccgcgcccgctcgcctcgtctcgcccggcctccccgcgtcgcctcgtcgcctgttccgcgccaggcatggcccccagcactgtggccgtggagctgctcagccccaaagagaaaaaccgactgcggaagccggtggtggagaagatgcgccgcgaccgcatcaacagcagcatcgagcanctgaagctgctgctggagcaggagttcgcgcggcaccagcccaactccaagctggagaaggccgacatcctggagatggctgtcagctacctgaagcacagcaaagccttcgtcgccgccgccggccccnagagcctgcnccaggactacagcgaaggctactcgtggtgcctgcangangccgtgcanttnctgacgctnnnngccgccagcgacacncntatgaagctgatgtancacttccagtggncccnngnnncnccng

SEQ ID NO: 131 - DNA, 1161 bp, Homo Sapiens
  misc_feature (859)..(859): n is a, c, g, or t
  misc_feature (869)..(869): n is a, c, g, or t
  misc_feature (902)..(902): n is a, c, g, or t
  misc_feature (916)..(916): n is a, c, g, or t
  misc_feature (933)..(933): n is a, c, g, or t
  misc_feature (972)..(972): n is a, c, g, or t
  misc_feature (988)..(988): n is a, c, g, or t
  misc_feature (1002)..(1002): n is a, c, g, or t
  misc_feature (1008)..(1008): n is a, c, g, or t
  misc_feature (1018)..(1018): n is a, c, g, or t
  misc_feature (1044)..(1044): n is a, c, g, or t
  misc_feature (1046)..(1046): n is a, c, g, or t
  misc_feature (1065)..(1065): n is a, c, g, or t
  misc_feature (1067)..(1067): n is a, c, g, or t
  misc_feature (1069)..(1069): n is a, c, g, or t
  misc_feature (1077)..(1077): n is a, c, g, or t
  misc_feature (1081)..(1081): n is a, c, g, or t
  misc_feature (1104)..(1104): n is a, c, g, or t
  misc_feature (1112)..(1112): n is a, c, g, or t
  misc_feature (1116)..(1116): n is a, c, g, or t
  misc_feature (1120)..(1120): n is a, c, g, or t
  misc_feature (1124)..(1124): n is a, c, g, or t
  misc_feature (1126)..(1126): n is a, c, g, or t
  misc_feature (1135)..(1135): n is a, c, g, or t
  misc_feature (1145)..(1145): n is a, c, g, or t
  misc_feature (1154)..(1154): n is a, c, g, or t
  misc_feature (1161)..(1161): n is a, c, g, or t
atagagaaattactatgagaggatcgcatcaccatcaccatcacggatcctatttaggtgacactatagaatcgtcgacccacgcgtccgtagataatgccttaatacgtcctggtcgttttgacatgcaagttacagttccaaggccagatgtaaaaggtcgaacagaaattttgaaatggtatctcaataaaataaagtttgatcaatccgttgatccagaaattatagctcgaggtactgttggcttttccggagcagagttggagaatcttgtgaaccaggctgcattaaaagcagctgttgatggaaaagaaatggttaccatgaaggagctggagttttccaaagacaaaattctaatggggcctgaaagaagaagtgtggaaattgataacaaaaacaaaaccatcacagcatatcatgaatctggtcatgccattattgcatattacacaaaagatgcaatgcctatcaacaaagctacaatcatgccacgggggccaacacttggacatgtgtccctgttacctgagaatgacagatggaatgaaactagagcccagctgcttgcacaaatggatgttagtatgggaggaagagtggcagaggagcttatatttggaaccgaccatattacaacaggtgcttccagtgattttgataatgccactaaaatagcaaagcggatggttaccaaatttggaatgagtgaaaagcttggagttatgacctacagtgatacagggaaactaagtccagaaacccaatctgccatcgaacaagaaataagaatccttctaagggactcatatgaacgagcaaaacatatcttgaaactcatgcaaaggagcataanaatctcgcanaagctttattgacctatgaaactttggatgccnaagagattccaatngttcttgaggggaaaangtgggaagtgagatgataactctcttgatatggatgctngctggttttatgcaanaataaagtagcatngcatantctactttanacgctttcccccattctgatgggggnantgaaggggggaaagcttgncnanccttgccnattntcccgttggggtttcccctaganccctttgnaatnaccncccngnaaatttttngaaaaataanacttccggntgaaccn

SEQ ID NO: 132 - DNA, 1054 bp, Homo Sapiens
  misc_feature (1)..(1): n is a, c, g, or t
  misc_feature (781)..(781): n is a, c, g, or t
  misc_feature (794)..(794): n is a, c, g, or t
  misc_feature (818)..(818): n is a, c, g, or t
  misc_feature (836)..(836): n is a, c, g, or t
  misc_feature (848)..(848): n is a, c, g, or t
  misc_feature (862)..(862): n is a, c, g, or t
  misc_feature (873)..(873): n is a, c, g, or t
  misc_feature (876)..(876): n is a, c, g, or t
  misc_feature (898)..(898): n is a, c, g, or t
  misc_feature (903)..(903): n is a, c, g, or t
  misc_feature (919)..(919): n is a, c, g, or t
  misc_feature (921)..(921): n is a, c, g, or t
  misc_feature (926)..(926): n is a, c, g, or t
  misc_feature (954)..(954): n is a, c, g, or t
  misc_feature (959)..(960): n is a, c, g, or t
  misc_feature (964)..(964): n is a, c, g, or t
  misc_feature (966)..(966): n is a, c, g, or t
  misc_feature (978)..(978): n is a, c, g, or t
  misc_feature (991)..(991): n is a, c, g, or t
  misc_feature (1000)..(1000): n is a, c, g, or t
  misc_feature (1005)..(1005): n is a, c, g, or t
  misc_feature (1013)..(1013): n is a, c, g, or t
  misc_feature (1017)..(1017): n is a, c, g, or t
  misc_feature (1019)..(1019): n is a, c, g, or t
  misc_feature (1023)..(1023): n is a, c, g, or t
  misc_feature (1027)..(1027): n is a, c, g, or t
  misc_feature (1034)..(1034): n is a, c, g, or t
  misc_feature (1040)..(1040): n is a, c, g, or t
  misc_feature (1044)..(1044): n is a, c, g, or t
  misc_feature (1047)..(1047): n is a, c, g, or t
  misc_feature (1049)..(1050): n is a, c, g, or t
naattagagaaattactatgagaggatcgcatcaccatcaccatcacggatcctatttaggtgacactatagaatcgtcgacccacgcgttccgaaatgcagcagcttaaacttggaaggaaagaactattgcacagccaaaacattgtatatatctgactcagacaagcgaaagcacttcatgttgtctgtaaagatgttctatggcaacagtgatgacattggtgtgttcctcagcaagcggataaaagtcatctccaaaccttccaaaaagaagcagtcattgaaaaatgctgacttatgcattgcctcaggaacaaaggtggctctgtttaatcgactacgatcccagacagttagtaccagatacttgcatgtagaaggaggtaattttcatgccagttcacagcagtggggagccttttttattcatctcttggatgatgatgaatcagaaggagaagaattcacagtccgagatggctacatccattatggacaaacagtcaaacttgtgtgctcagttactggcatggcactcccaagattgataattaggaaagttgataagcagaccgcattattggatgcagatgatcctgtgtcacaactccataaatgtgcattttaccttaaggatacagaaagaatgtatttgtgcctttctcaagaaagaataattcaatttcaggccactccatgtccaaaagaaccaaataaagagatgataaatgatggcgcttcctggacaatcattagcacagataaggcagagtatacnttttatgagggantgggccctgtccttgccccagtcnctcctgtggcctgggggnaaagagccttcngttgaatgggcggnggggaacgtancantgcttgaacttacagaacaaantttcnctccaaatttacgagngnggttnggggatgtaaaacctgaaactatgtacnggggnnggananagttgcctttgngtcccccccaaanttttctgcnttccnaaaaggtngaanangggnccgnccacccncccggntccnagnannttgg

SEQ ID NO: 133 - DNA, 1218 bp, Homo Sapiens
  misc_feature (836)..(836): n is a, c, g, or t
  misc_feature (925)..(925): n is a, c, g, or t
  misc_feature (937)..(937): n is a, c, g, or t
  misc_feature (960)..(960): n is a, c, g, or t
  misc_feature (1003)..(1003): n is a, c, g, or t
  misc_feature (1013)..(1013): n is a, c, g, or t
  misc_feature (1033)..(1033): n is a, c, g, or t
  misc_feature (1038)..(1038): n is a, c, g, or t
  misc_feature (1043)..(1043): n is a, c, g, or t
  misc_feature (1059)..(1059): n is a, c, g, or t
  misc_feature (1067)..(1068): n is a, c, g, or t
  misc_feature (1076)..(1076): n is a, c, g, or t
  misc_feature (1078)..(1078): n is a, c, g, or t
  misc_feature (1080)..(1080): n is a, c, g, or t
  misc_feature (1083)..(1083): n is a, c, g, or t
  misc_feature (1087)..(1087): n is a, c, g, or t
  misc_feature (1103)..(1104): n is a, c, g, or t
  misc_feature (1109)..(1109): n is a, c, g, or t
  misc_feature (1111)..(1111): n is a, c, g, or t
  misc_feature (1119)..(1119): n is a, c, g, or t
  misc_feature (1136)..(1136): n is a, c, g, or t
  misc_feature (1149)..(1149): n is a, c, g, or t
  misc_feature (1156)..(1157): n is a, c, g, or t
  misc_feature (1159)..(1159): n is a, c, g, or t
  misc_feature (1162)..(1162): n is a, c, g, or t
  misc_feature (1173)..(1173): n is a, c, g, or t
  misc_feature (1186)..(1186): n is a, c, g, or t
  misc_feature (1202)..(1202): n is a, c, g, or t
  misc_feature (1209)..(1209): n is a, c, g, or t
  misc_feature (1215)..(1215): n is a, c, g, or t
  misc_feature (1217)..(1217): n is a, c, g, or t
tagagaaattactatgagaggatcgcatcaccatcaccatcacggatcctatttaggtgacactatagaatcgtcgacccacgcgtccgatttaatgtctgaatctggagaaggggaaatctccccacaaagagaagtctcaagatcccaggatcagttcagtgatatgagaatcagcataaaccagacgcctgggaagagtcttgactttgggtttacaataaaatgggatattcctgggatcttcgtagcatcagttgaagcaggtagcccagcagaattttctcagctacaagtagatgatgaaattattgctattaacaacaccaagttttcatataacgattcaaaagagtgggaggaagccatggctaaggctcaagaaactggacacctagtgatggatgtgaggcgctatggaaaggctggttcacctgaaacaaagtggattgatgcaacttctggaatttacaactcagaaaaatcttcaaatctgtctgtaacaactgatttctccgaaagccttcagagttctaatattgaatccaaagaaatcaatggaattcatgatgaaagcaatgcttttgaatcaaaagcatctgaatccatttctttgaaaaacttaaaaaggcgatcacaattttttgaacaaggaagctctgattcggtggttcctgatcttccagttccaaccatcagtgccccgagtcgctgggtgtgggatcaagaggaggagcggaagcggcaggagaggtggcagaaggagcaggaccgcctactgcaggaaaaatatcaacgtgagcaggagaaactgagggaagagtggcaaagggccnaacaggaggcagagagagagaattccaagtacttggatgaggaactgatggtcctaagctcaaacagcatgtctctgaccacacgggancctctcttgccncctgggaagctacctggagtganggtccaagtcttcaaacagagaaggaaccccgagcaggaaaanaggaaagganaccgcccccaagaggaagtngttcntgagnaccagggaaaaacccncaggatcnncttgtttntngnaanaaanagaaatggggaccccnncttcngnaaaacaanacaaaaccggcttccgnctgaggttgagancaaaacnncnggnggagaacaaancccccgccaaaanaagcgggaaacccctnccaaaancccgtncng

SEQ ID NO: 134 - DNA, 654 bp, Homo Sapiens
  misc_feature (88)..(88): n is a, c, g, or t
tagaggaaaattactatgagaggatcgcatcaccatcaccatcacggatcctatttaggtgacactatagaatcgtcgacccacgcgntccgcccacgcgtccgcccacgcgtccgcccacgcgtccgcccacgcgtccggatagatcgccatcatgaacgacaccgtaactatccgcactagaaagttcatgaccaaccgactacttcagaggaaacaaatggtcattgatgtccttcaccccgggaaggcgacagtgcctaagacagaaattcgggaaaaactagccaaaatgtacaagaccacaccggatgtcatctttgtatttggattcagaactcattttggtggtggcaagacaactggctttggcatgatttatgattccctggattatgcaaagaaaaatgaacccaaacatagacttgcaagacatggcctgtatgagaagaaaaagacctcaagaaagcaacgaaaggaacgcaagaacagaatgaagaaagtcagggggactgcaaaggccaatgttggtgctggcaaaaagtgagctggagattggatcacagccgaaggagtaaaggtgctgcaatgatgttagctgtggccactgtggatttttcgcaagaacattaataaactaaaaacttcatgtgt

SEQ ID NO: 135 - DNA, 1193 bp, Homo Sapiens
  misc_feature (1)..(1): n is a, c, g, or t
  misc_feature (4)..(4): n is a, c, g, or t
  misc_feature (903)..(903): n is a, c, g, or t
  misc_feature (920)..(920): n is a, c, g, or t
  misc_feature (923)..(923): n is a, c, g, or t
  misc_feature (925)..(925): n is a, c, g, or t
  misc_feature (958)..(958): n is a, c, g, or t
  misc_feature (960)..(960): n is a, c, g, or t
  misc_feature (982)..(982): n is a, c, g, or t
  misc_feature (999)..(999): n is a, c, g, or t
  misc_feature (1017)..(1017): n is a, c, g, or t
  misc_feature (1019)..(1019): n is a, c, g, or t
  misc_feature (1022)..(1022): n is a, c, g, or t
  misc_feature (1025)..(1025): n is a, c, g, or t
  misc_feature (1036)..(1036): n is a, c, g, or t
  misc_feature (1060)..(1060): n is a, c, g, or t
  misc_feature (1084)..(1084): n is a, c, g, or t
  misc_feature (1091)..(1091): n is a, c, g, or t
  misc_feature (1113)..(1113): n is a, c, g, or t
  misc_feature (1125)..(1125): n is a, c, g, or t
  misc_feature (1134)..(1134): n is a, c, g, or t
  misc_feature (1136)..(1136): n is a, c, g, or t
  misc_feature (1142)..(1142): n is a, c, g, or t
  misc_feature (1145)..(1145): n is a, c, g, or t
  misc_feature (1148)..(1148): n is a, c, g, or t
  misc_feature (1157)..(1157): n is a, c, g, or t
  misc_feature (1164)..(1164): n is a, c, g, or t
  misc_feature (1175)..(1176): n is a, c, g, or t
  misc_feature (1178)..(1178): n is a, c, g, or t
  misc_feature (1186)..(1186): n is a, c, g, or t
  misc_feature (1190)..(1190): n is a, c, g, or t
  misc_feature (1192)..(1193): n is a, c, g, or t
naantagagaaaattaactatgagaggatcgcatcaccatcaccatcacggatcctatttaggtgacactatagaatcgtcgacccacgcgtccgcccacgcgtccggtcgacttctcctcggaggtgactgctgccctccgagtcaccgatggcgcattggtggtggtggactgcgtgtcaggcgtgtgcgtgcagacggagacagtgctgcggcaggccattgccgagcgcatcaagcctgtgctgatgatgaacaagatggaccgcgccctgctggagctgcagctggagcccgaggagctctaccagactttccagcgcatcgtggagaacgtgaacgtcatcatctccacctacggcgagggcgagagcggccccatgggcaacatcatgatcgatcctgtcctcggtaccgtgggctttgggtctggcctccacgggtgggccttcaccctgaagcagtttgccgagatgtatgtggccaagttcgccgccaagggggagggccagttggggcctgccgagcgggccaagaaagtagaggacatgatgaagaagctgtggggtgacaggtactttgacccagccaacggcaagttcagcaagtcagccaccagccccgaagggaagaagctgccacgcaccttctgccagctgatcctggaccccatcttcaaggtgtttgatgcgatcatgaatttcaagaaagaggagacagcaaaactgatagagaaactggacatcaaactggacagcgaggacaaggacaaagaaggcaaacccctgctgaaggctgtgatgcgccgctggctgcctgccggagacgccttgttgcagatgatcaccatccacctgccctcccctgtgacggcccaaaagtaccgctgcgagctcctgtacnaagggccccccggaacnacnangctgccatgggcattaaaagctgtgaccccaangnccctcttatgatgtatatttcnaaatggtgccaacctcnaaaaaggtcggttctacncnttnganaaatcttcccngggctggtctccctggcctgaagntcaggatcatggggcccaactaanccctggnaaaaagagaacctctactgaanccatccaaaaanaattttganangggccnctnctngaaccatcnaggaatngcttggggaanntntgggcctngggngnn

SEQ ID NO: 136 - DNA, 1131 bp, Homo Sapiens
  misc_feature (1)..(1): n is a, c, g, or t
  misc_feature (3)..(3): n is a, c, g, or t
  misc_feature (861)..(861): n is a, c, g, or t
  misc_feature (949)..(949): n is a, c, g, or t
  misc_feature (961)..(961): n is a, c, g, or t
  misc_feature (976)..(976): n is a, c, g, or t
  misc_feature (980)..(980): n is a, c, g, or t
  misc_feature (984)..(985): n is a, c, g, or t
  misc_feature (1010)..(1010): n is a, c, g, or t
  misc_feature (1014)..(1014): n is a, c, g, or t
  misc_feature (1027)..(1027): n is a, c, g, or t
  misc_feature (1037)..(1037): n is a, c, g, or t
  misc_feature (1042)..(1042): n is a, c, g, or t
  misc_feature (1046)..(1046): n is a, c, g, or t
  misc_feature (1064)..(1064): n is a, c, g, or t
  misc_feature (1083)..(1083): n is a, c, g, or t
  misc_feature (1093)..(1093): n is a, c, g, or t
  misc_feature (1097)..(1097): n is a, c, g, or t
  misc_feature (1099)..(1100): n is a, c, g, or t
  misc_feature (1102)..(1103): n is a, c, g, or t
  misc_feature (1105)..(1105): n is a, c, g, or t
  misc_feature (1107)..(1107): n is a, c, g, or t
  misc_feature (1116)..(1117): n is a, c, g, or t
  misc_feature (1125)..(1125): n is a, c, g, or t
  misc_feature (1128)..(1128): n is a, c, g, or t
  misc_feature (1131)..(1131): n is a, c, g, or t
nantagagaaattactatgagaggatcgcatcaccatcaccatcacggatcctatttaggtgacactatagaatcgtcgacccacgcgtccgggaagcacccaaatgagatctgtgtgccaatgtcagtggaatttgaggaactcctgaaggctcgagagaatccaagtgaagaggcacaaaacttggtggagttcacagatgaagagggatatggtcgttatctcgatctccatgactgttacctcaagtacattaacctgaaggcatctgagaagctggattatatcacatacctgtccatctttgaccaattatttgacattcctaaagaaaggaagaatgcagagtataagagatacctagagatgctgcttgagtaccttcaggattacacagatagagtgaagcctctccaagatcagaatgaactttttgggaagattcaggctgagtttgagaagaaatgggagaatgggacctttcctggatggccgaaagagacaagcagtgccctgacccatgctggagcccatcttgacctctctgcattctcctcctgggaggagttggcttctctgggtttggacagattgaaatctgctctcttagctttaggcttgaaatgtggcgggaccctagaagagcgagcccagagactattcagtaccaaaggaaagtccctggagtcacttgatacctctttgtttgccaaaaatcccaagtcaaagggcaccaagcgagacactgaaaggaacaaagacattgcttttctagaagcccagatctatgaatatgtagagattctcggggaacagcgacatctcactcatgaaaaatgtacagcgcaagcaagccaggnacaggagaagagcgagaagaagaggaagaagagcagatcagtgagagtgaaagtgaagatgaagagaacgagatcttttacaaccccnaaaaacctgccncttggctggggatgncaancctnnttccctactggctgtataaccttcntggncctaaaaatccanctacaactgngaaanttgngggaaactaccccctacngagggcccaaagccttccngcgaaccttngctnanngnncncnggctctggnntggggggnttnggn

SEQ ID NO: 137 - DNA, 1220 bp, Homo Sapiens
  misc_feature (68)..(68): n is a, c, g, or t
  misc_feature (71)..(71): n is a, c, g, or t
  misc_feature (968)..(969): n is a, c, g, or t
  misc_feature (980)..(980): n is a, c, g, or t
  misc_feature (985)..(985): n is a, c, g, or t
  misc_feature (997)..(997): n is a, c, g, or t
  misc_feature (1010)..(1010): n is a, c, g, or t
  misc_feature (1016)..(1016): n is a, c, g, or t
  misc_feature (1033)..(1034): n is a, c, g, or t
  misc_feature (1036)..(1036): n is a, c, g, or t
  misc_feature (1038)..(1038): n is a, c, g, or t
  misc_feature (1042)..(1042): n is a, c, g, or t
  misc_feature (1055)..(1056): n is a, c, g, or t
  misc_feature (1068)..(1068): n is a, c, g, or t
  misc_feature (1080)..(1080): n is a, c, g, or t
  misc_feature (1095)..(1095): n is a, c, g, or t
  misc_feature (1106)..(1106): n is a, c, g, or t
  misc_feature (1119)..(1119): n is a, c, g, or t
  misc_feature (1122)..(1122): n is a, c, g, or t
  misc_feature (1130)..(1130): n is a, c, g, or t
  misc_feature (1145)..(1145): n is a, c, g, or t
  misc_feature (1162)..(1162): n is a, c, g, or t
  misc_feature (1174)..(1174): n is a, c, g, or t
  misc_feature (1178)..(1178): n is a, c, g, or t
  misc_feature (1192)..(1192): n is a, c, g, or t
  misc_feature (1197)..(1197): n is a, c, g, or t
  misc_feature (1200)..(1200): n is a, c, g, or t
  misc_feature (1206)..(1206): n is a, c, g, or t
  misc_feature (1219)..(1219): n is a, c, g, or t
ctatagagaaattactatgagaggatcgcatcaccatcaccatcacggatcctatttaggtgacactntanaatcgtcgacccacgcgtccgattttaaatccagctccatacaacgctccgccgccgctgctgccgcgacccggactgcgcgccagcacccccctgccgacagctccgtcactatggaggatatgaacgagtacagcaatatagaggaattcgcagagggatccaagatcaacgcgagcaagaatcagcaggatgacggtaaaatgtttattggaggcttgagctgggatacaagcaaaaaagatctgacagagtacttgtctcgatttggggaagttgtagactgcacaattaaaacagatccagtcactgggagatcaagaggatttggatttgtgcttttcaaagatgctgctagtgttgataaggttttggaactgaaagaacacaaactggatggcaaattgatagatcccaaaagggccaaagctttaaaagggaaagaacctcccaaaaaggtttttgtgggtggattgagcccggatacttctgaagaacaaattaaagaatattttggagcctttggagagattgaaaatattgaacttcccatggatacaaaaacaaatgaaagaagaggattttgttttatcacatatactgatgaagagccagtaaaaaaattgttagaaagcagataccatcaaattggttctgggaagtgtgaaatcaaagttgcacaacccaaagaggtatataggcagcaacagcaacaacaaaaaggtggaagaggtgctgcagctggtggacgaggtggtacgaggggtcgtggccgaggtcagggccaaactggaaccaaggatttaataactatttatgatcaaggatatggaaattacaatagtgcctatggtggtgatcaaaactatagtggctatgggcggatatgattatacnngggtataactntgggnaactatggaatngggacaggggatnttgcanactacagtggcccacannancncttntgggcaaggcatnncgaggggggggnaatccccaaacnatttcccgccttctnagggaaacttngggaaaaccgggnggnatgttaantacccccccttgccngaccactttgaaattgncctcggtgatcnaaanaattttttgaaaanctttnggntcaaancctttgggccacnt

SEQ ID NO: 138 - DNA, 1186 bp, Homo Sapiens
  misc_feature (893)..(893): n is a, c, g, or t
  misc_feature (955)..(955): n is a, c, g, or t
  misc_feature (983)..(983): n is a, c, g, or t
  misc_feature (986)..(986): n is a, c, g, or t
  misc_feature (1010)..(1011): n is a, c, g, or t
  misc_feature (1034)..(1034): n is a, c, g, or t
  misc_feature (1042)..(1042): n is a, c, g, or t
  misc_feature (1052)..(1052): n is a, c, g, or t
  misc_feature (1056)..(1056): n is a, c, g, or t
  misc_feature (1059)..(1059): n is a, c, g, or t
  misc_feature (1062)..(1062): n is a, c, g, or t
  misc_feature (1081)..(1081): n is a, c, g, or t
  misc_feature (1084)..(1084): n is a, c, g, or t
  misc_feature (1086)..(1086): n is a, c, g, or t
  misc_feature (1090)..(1090): n is a, c, g, or t
  misc_feature (1097)..(1097): n is a, c, g, or t
  misc_feature (1101)..(1101): n is a, c, g, or t
  misc_feature (1114)..(1114): n is a, c, g, or t
  misc_feature (1140)..(1140): n is a, c, g, or t
  misc_feature (1151)..(1151): n is a, c, g, or t
  misc_feature (1158)..(1158): n is a, c, g, or t
  misc_feature (1167)..(1167): n is a, c, g, or t
  misc_feature (1186)..(1186): n is a, c, g, or t
tagagaaattactatgagaggatcgcatcaccatcaccatcacggatcctatttaggtgacactatagaatcgtcgacccacgcgtccgccgtgagggaagcgtctccgttgggtccggccgctctgcgggactctgaggaaaagctcgcaccaggtggacgcggatctgtcaacatgggtaaaggagaccccaacaagccgcggggcaaaatgtcctcgtacgccttcttcgtgcagacctgccgggaagagcacaagaagaaacacccggactcttccgtcaatttcgcggaattctccaagaagtgttcggagagatggaagaccatgtctgcaaaggagaagtcgaagtttgaagatatggcaaaaagtgacaaagctcgctatgacagggagatgaaaaattacgttcctcccaaaggtgataagaaggggaagaaaaaggaccccaatgctcctaaaaggccaccatctgccttcttcctgttttgctctgaacatcgcccaaagatcaaaagtgaacaccctggcctatccattggggatactgcaaagaaattgggtgaaatgtggtctgagcagtcagccaaagataaacaaccatatgaacagaaagcagctaagctaaaggagaaatatgaaaaggatattgctgcatatcgtgccaagggcaaaagtgaagcaggaaagaagggccctggcaggccaacaggctcaaagaagaagaacgaaccagaagatgaggaggaggaggaggaagaagaagatgaagatgaggaggaagaggatgaagatgaagaataaatggctatcctttaatgatgcgtgtggaatgtgtgtgtgtgctcaggcaattatttttgctaagaatgtgaattcaagtgcagctcantactagcttcagttataaaaaactgtacagatttttgtatagctgaataaaattctctgtanaaaaaatacttttaaaaatgcaggttgntanctttttgatggggctactcatacnngttaaattttacagctttctganggttgaangttcctaaantttnaanggnttttttaattcttgggganggnancccnccaaacntgtnggaattagtttcnatagtaaattttggggtttttaggangtggcatttcnttttttnaaaaatttngaaaaaaattttgtttttn

SEQ ID NO: 139 - DNA, 928 bp, Homo Sapiens
  misc_feature (1)..(2): n is a, c, g, or t
  misc_feature (94)..(94): n is a, c, g, or t
  misc_feature (110)..(110): n is a, c, g, or t
  misc_feature (120)..(122): n is a, c, g, or t
  misc_feature (131)..(131): n is a, c, g, or t
  misc_feature (140)..(140): n is a, c, g, or t
  misc_feature (145)..(145): n is a, c, g, or t
  misc_feature (148)..(148): n is a, c, g, or t
  misc_feature (156)..(156): n is a, c, g, or t
  misc_feature (160)..(160): n is a, c, g, or t
  misc_feature (170)..(170): n is a, c, g, or t
  misc_feature (184)..(184): n is a, c, g, or t
  misc_feature (202)..(202): n is a, c, g, or t
  misc_feature (207)..(207): n is a, c, g, or t
  misc_feature (215)..(215): n is a, c, g, or t
  misc_feature (220)..(220): n is a, c, g, or t
  misc_feature (260)..(260): n is a, c, g, or t
  misc_feature (421)..(421): n is a, c, g, or t
  misc_feature (460)..(460): n is a, c, g, or t
  misc_feature (462)..(462): n is a, c, g, or t
  misc_feature (475)..(475): n is a, c, g, or t
  misc_feature (484)..(485): n is a, c, g, or t
  misc_feature (492)..(492): n is a, c, g, or t
  misc_feature (499)..(499): n is a, c, g, or t
  misc_feature (504)..(504): n is a, c, g, or t
  misc_feature (506)..(507): n is a, c, g, or t
  misc_feature (522)..(522): n is a, c, g, or t
  misc_feature (533)..(533): n is a, c, g, or t
  misc_feature (545)..(545): n is a, c, g, or t
  misc_feature (559)..(559): n is a, c, g, or t
  misc_feature (575)..(575): n is a, c, g, or t
  misc_feature (597)..(597): n is a, c, g, or t
  misc_feature (607)..(608): n is a, c, g, or t
  misc_feature (643)..(644): n is a, c, g, or t
  misc_feature (647)..(647): n is a, c, g, or t
  misc_feature (654)..(655): n is a, c, g, or t
  misc_feature (659)..(661): n is a, c, g, or t
  misc_feature (676)..(677): n is a, c, g, or t
  misc_feature (693)..(694): n is a, c, g, or t
  misc_feature (707)..(707): n is a, c, g, or t
  misc_feature (727)..(727): n is a, c, g, or t
  misc_feature (736)..(736): n is a, c, g, or t
  misc_feature (750)..(750): n is a, c, g, or t
  misc_feature (757)..(757): n is a, c, g, or t
  misc_feature (772)..(772): n is a, c, g, or t
  misc_feature (779)..(779): n is a, c, g, or t
  misc_feature (809)..(810): n is a, c, g, or t
  misc_feature (819)..(819): n is a, c, g, or t
  misc_feature (823)..(823): n is a, c, g, or t
  misc_feature (865)..(865): n is a, c, g, or t
  misc_feature (871)..(872): n is a, c, g, or t
  misc_feature (877)..(877): n is a, c, g, or t
  misc_feature (880)..(880): n is a, c, g, or t
  misc_feature (904)..(904): n is a, c, g, or t
  misc_feature (906)..(906): n is a, c, g, or t
  misc_feature (925)..(925): n is a, c, g, or t
  misc_feature (928)..(928): n is a, c, g, or t
nnattagagaaattactatgagaggatcgcatcaccatcaccatcacggatcctatttaggtgacactatagaatcgtcgacccacgcgtccgnccacgcgctccgggantggaggcagnnnagcagaggnctgtggaanatggnganaggggctntgangccaacatangggtggaaatggancctgaactccgggaaggntcganaatggacncccanggacatagaggctcaaactcagaaaccagaacctccagantcatcagagaagcttctggaatctcccggtgtggaggctggagaaggggaggctgagaaggaggaggcgggggctcagggcaggcctctgagagccctgcagaactgctgctctgtgccctcccccctcccaccagaggacgctgggactggaggcctganacagcaggaagaggaagcattggagctccagcccccacnancagcccctctgtntcccccacnnccagccncaactgnccccnannctcctggggatcccntcatgagccgnctgttctatggngtgaaggcaggtcnaggggtgggggccccncgccgcagtggacacaccttcncctgtcaacnnccggtggtctgtgccccctgcgaccccagccaccnnaanctctcgnnccannnttgatgctgcaatcnnggggtctggtaagaannggtacccaactgncgaggagatcttgattctgnggggatacntccgtctcatcctnagctgcngttgccaaggtgtcnccctaangacacctgaaacagcttaatatctccttcnncgagactcnctgnagaccacgtaccattacccctcctagagttcggaactgaagnaactgnncctgnagnctgaggtccccagtgcccccaacntncagaaacccacccgactangan

SEQ ID NO: 140 - DNA, 1065 bp, Homo Sapiens
  misc_feature (1)..(1): n is a, c, g, or t
  misc_feature (3)..(3): n is a, c, g, or t
  misc_feature (932)..(932): n is a, c, g, or t
  misc_feature (943)..(943): n is a, c, g, or t
  misc_feature (948)..(948): n is a, c, g, or t
  misc_feature (969)..(969): n is a, c, g, or t
  misc_feature (995)..(995): n is a, c, g, or t
  misc_feature (1007)..(1007): n is a, c, g, or t
  misc_feature (1009)..(1010): n is a, c, g, or t
  misc_feature (1012)..(1012): n is a, c, g, or t
  misc_feature (1036)..(1036): n is a, c, g, or t
  misc_feature (1044)..(1044): n is a, c, g, or t
  misc_feature (1047)..(1051): n is a, c, g, or t
  misc_feature (1054)..(1056): n is a, c, g, or t
  misc_feature (1058)..(1058): n is a, c, g, or t
  misc_feature (1060)..(1064): n is a, c, g, or t
nantagagaaattactatgagaggatcgcatcaccatcaccatcacggatcctatttaggtgacactatagaatcgtcgacccacgcgtccgggggtagtcgccgccgccgccgccgctgcagccactgcaggcaccgctgccgccgcctgagtagtgggcttaggaaggaagaggtcatctcgctcggagcttcgctcggaagggtctttgttccctgcagccctcccacgggaatgacaatggataaaagtgagctggtacagaaagccaaactcgctgagcaggctgagcgatatgatgatatggctgcagccatgaaggcagtcacagaacaggggcatgaactctccaacgaagagagaaatctgctctctgttgcctacaagaatgtggtaggcgcccgccgctcttcctggcgtgtcatctccagcattgagcagaaaacagagaggaatgagaagaagcagcagatgggcaaagagtaccgtgagaagatagaggcagaactgcaggacatctgcaatgatgttctggagctgttggacaaatatcttattcccaatgctacacaaccagaaagtaaggtgttctacttgaaaatgaaaggagattattttaggtatctttctgaagtggcatctggagacaacaaacaaaccactgtgtcgaactcccagcaggcttaccaggaagcatttgaaattagtaagaaagaaatgcagcctacacacccaattcgtcttggtctggcactaaatttctcagtcttttactatgagattctaaactctcctgaaaaggcctgtagcctggcaaaaacggcatttgatgaagcaattgctgaattggatacgctgaatgaagagtcttataaagacagcactctgatcatgcagttacttagggacaatctcactctgtggacatcgnaaaaccagggnaaacnaaggaaacgctggggaggganagaactaatgtttccccgggctttgngatctgttcaangnncnctctgtaccctcaacatatttccnttgggcgnttnnnnnaannnanannnnna

SEQ ID NO: 141 - DNA, 166 bp, Homo Sapiens
  misc_feature (2)..(2): n is a, c, g, or t
  misc_feature (5)..(5): n is a, c, g, or t
  misc_feature (7)..(7): n is a, c, g, or t
  misc_feature (12)..(12): n is a, c, g, or t
  misc_feature (23)..(23): n is a, c, g, or t
  misc_feature (28)..(28): n is a, c, g, or t
  misc_feature (41)..(43): n is a, c, g, or t
  misc_feature (54)..(54): n is a, c, g, or t
  misc_feature (57)..(57): n is a, c, g, or t
  misc_feature (76)..(77): n is a, c, g, or t
  misc_feature (84)..(84): n is a, c, g, or t
  misc_feature (108)..(108): n is a, c, g, or t
  misc_feature (112)..(112): n is a, c, g, or t
  misc_feature (116)..(118): n is a, c, g, or t
  misc_feature (126)..(126): n is a, c, g, or t
  misc_feature (133)..(133): n is a, c, g, or t
  misc_feature (149)..(149): n is a, c, g, or t
  misc_feature (152)..(152): n is a, c, g, or t
  misc_feature (156)..(156): n is a, c, g, or t
  misc_feature (163)..(163): n is a, c, g, or t
  misc_feature (166)..(166): n is a, c, g, or t
gnagngnggggnggggggggggnggggnggggggggggccnnncaggggtgggngangaggaggtgagggggggtnngcgcttnttttttttttcggcgtttgggttnttanttannnttgtggtnttttttntctctgccataattcnatnttangaggtangcn

SEQ ID NO: 142 - DNA, 178 bp, Homo Sapiens
  misc_feature (2)..(2): n is a, c, g, or t
  misc_feature (6)..(6): n is a, c, g, or t
  misc_feature (8)..(9): n is a, c, g, or t
  misc_feature (14)..(17): n is a, c, g, or t
  misc_feature (27)..(27): n is a, c, g, or t
  misc_feature (33)..(33): n is a, c, g, or t
  misc_feature (76)..(76): n is a, c, g, or t
  misc_feature (127)..(127): n is a, c, g, or t
  misc_feature (135)..(135): n is a, c, g, or t
  misc_feature (162)..(163): n is a, c, g, or t
  misc_feature (169)..(169): n is a, c, g, or t
  misc_feature (173)..(174): n is a, c, g, or t
  misc_feature (176)..(177): n is a, c, g, or t
tncttntnnctctnnnngtaatcttanagaggngaattaactatggagaggatcgcatcaccatcaccatcacggnatcctatttaggtgacactatagaatcgtacgacccacgcgtccggcccgngcgtcagnaaagggaggaaaaaaacccaccctgcnnccgcgnccgnnannt

SEQ ID NO: 143 - DNA, 694 bp, Homo Sapiens
  misc_feature (3)..(4): n is a, c, g, or t
ttnnctatgagaggatcgcatcaccatcaccatcacggatcctatttaggtgacactatagaatcgtcgacccacgcgtccgcaaagataaaatacagacagactactcaggatgcccctgaagaggttcgtaaccgtgacttcaggagagagttggaagaaagagagagagctgctgcaagagagaaaaatagggatcgtccaacccgagaacatacaacctcctcttcagtgtcaaaaaagccacggttagaccagattcctgccgccaaccttgatgcagatgaccctctaacagatgaggaagatgaagattttgaagaagaaagtgatgatgatgatactgcagctcttcttgcagaactggaaaaaattaaaaaagaaagagctgaagagcaggccaggaaggaacaagaacaaaaagctgaagaagagaggattcgtatggaaaacattctgagcggaaaccctctccttaatctcactggcccatcccagcctcaggccaacttcaaagttaaaagaaggtgggatgatgacgttgtcttcaagaactgtgcaaaaggtgtagatgaccagaagaaagacaaaagatttgtaaatgacacactgcgatctgaatttcacaaaaagttcatggagaaatatattaaatagtacagttttatgtgcttaattaaagactgtaaaacgt

SEQ ID NO: 144 - DNA, 833 bp, Homo Sapiens
  misc_feature (3)..(3): n is a, c, g, or t
  misc_feature (642)..(642): n is a, c, g, or t
  misc_feature (649)..(649): n is a, c, g, or t
  misc_feature (731)..(731): n is a, c, g, or t
  misc_feature (744)..(744): n is a, c, g, or t
  misc_feature (770)..(770): n is a, c, g, or t
  misc_feature (773)..(773): n is a, c, g, or t
  misc_feature (777)..(777): n is a, c, g, or t
  misc_feature (781)..(781): n is a, c, g, or t
  misc_feature (793)..(793): n is a, c, g, or t
  misc_feature (811)..(811): n is a, c, g, or t
  misc_feature (829)..(829): n is a, c, g, or t
  misc_feature (832)..(832): n is a, c, g, or t
gangaggatcgcatcaccatcaccatcacggatcctatttaggtgacactatagaatcgtcgacccacgcgtccgcccacgcgtccgcccacgcgtccgtcgaccccgaccccgaccccgcagaggacaagcaggacattgacaagtttgggatccatgtataccagttccctgagtgtgactcggacgaggatgaggacttcaagcagcaggaccgggaactgaaggagagcgcgcccttcgccgttataggcagcaacacggtggtggaggccaaggggcagcgggtccggggccgactgtacccctgggggatcgtggaggtggagaaccaggcgcattgcgacttcgtgaagctgcgcaacatgctcatccgcacgcatatgcacgacctcaaggacgtgacgtgcgacgtgcactacgagaactaccgcgcgcactgcatccagcagatgaccagcaaactgacccaggacagccgcatggagagccccatcccgatcctgccgctgcccaccccggacgccgagactgagaagcttatcaggatgaaggatgaggaactgaggcgcatgcaggagatgctgcagaggatgaagcagcagatgcaggaccagtgacgctcgccgcggacacaccgtnccgtctncgggacgccctcgcacccctggacaccagaccggactgttcccgaccggagacgcggggccacagcccccagctgaccctantttattctcaggnaccccccccctcccagggtctttgtngtnttgntttnccgagggggccntggaaccgtaagcccccngcccaaggttggcccctnttnt

SEQ ID NO: 145 - DNA, 817 bp, Homo Sapiens
  misc_feature (4)..(4): n is a, c, g, or t
taanaggagaattaactatgagaggatcgcatcaccatcaccatcacggatcctatttaggtgacactatagaatcgtcgacccacgcgtccgccgccgtagccgcctccgagcccgccgccacatcctctgagcagaagatggctgtgccacccacgtatgccgatcttggcaaatctgccagggatgtcttcaccaagggctatggatttggcttaataaagcttgatttgaaaacaaaatctgagaatggattggaatttacaagctcaggctcagccaacactgagaccaccaaagtgacgggcagtctggaaaccaagtacagatggactgagtacggcctgacgtttacagagaaatggaataccgacaatacactaggcaccgagattactgtggaagatcagcttgcacgtggactgaagctgaccttcgattcatccttctcacctaacactgggaaaaaaaatgctaaaatcaagacagggtacaagcgggagcacattaacctgggctgcgacatggatttcgacattgctgggccttccatccggggtgctctggtgctaggttacgagggctggctggccggctaccagatgaattttgagactgcaaaatcccgagtgacccagagcaactttgcagttggctacaagactgatgaattccagcttcacactaatgtgaatgacgggacagagtttggcggctccatttaccagaaagtgaacaagaagttggagaccgctgtcaatcttgcctggacagcaggaaacagtaacacgcgcttcggaatagcagccaagtatca

SEQ ID NO: 146 - DNA, 824 bp, Homo Sapiens
  misc_feature (2)..(2): n is a, c, g, or t
  misc_feature (4)..(4): n is a, c, g, or t
  misc_feature (6)..(6): n is a, c, g, or t
  misc_feature (741)..(741): n is a, c, g, or t
  misc_feature (797)..(797): n is a, c, g, or t
tnangnggagaattaactatgagaggatcgcatcaccatcaccatcacggatcctatttaggtgacactatagaatcgtcgacccacgcgtccgaggaaacagacacggacttagaggtggtgttggaaaaaaaaggcaacatggatgaggcgcacatagaccaggtgaggcgaaaggccttgcaagaagagatcgatcgcgagtcaggcaaaacggaagcttctgaaaccaggaagtggacgggaacccagtttggccagtgggatactgctggttttgagaacgaggaccaaaaactgaaatttctcagacttatgggtggcttcaaaaacctgtccccttcgttcagccgccccgccagcacgattgcaaggcccaacatggccctcggcaagaaggcggctgacagcctgcagcagaatctgcagcgggactacgaccgggccatgagctggaagtacagccggggagccggcctcggcttctccaccgcccccaacaagatcttttacattgacaggaacgcttccaagtcagtcaagctggaagattaaactctagagttttgtccccccaaaactgccacaattgctttgattattccatttatgctggagattacaaattttttttgtgaaaaaatcagatcttggtgaggacctcgagcagtaagatataaataactcccataagcttagcgttccagtaatggaacactaggcataaatggtttattcagntgtgcaaatgaaagccatctgacagttggctcacattgaacacctgtggagattanggacgaggacaactatattgatgggct

SEQ ID NO: 147 - DNA, 830 bp, Homo Sapiens
  misc_feature (663)..(663): n is a, c, g, or t
  misc_feature (711)..(711): n is a, c, g, or t
  misc_feature (757)..(757): n is a, c, g, or t
  misc_feature (777)..(777): n is a, c, g, or t
  misc_feature (798)..(798): n is a, c, g, or t
  misc_feature (809)..(809): n is a, c, g, or t
taagaggagaattaactatgagaggatcgcatcaccatcaccatcacggatcctatttaggtgacactatagaatcgtcgacccacgcgtccgacctgctgccggacaaacggaggcggtacgagaccaaggtgcatcggcagacgctgaaccctcactttggggagaccttcgccttcaaggtcccctacgtggagctggggggcagggtgctggtcatggcggtgtacgacttcgaccgcttctctcgcaatgacgccatcggggaggtgcgggtccctatgagctccgtggacctggggcggccagtgcaggcctggcgggagctgcaggcggctccgcgggaggaggagaagcttggggacatctgcttctccctccgctatgtccccacggccgggaagctcaccgtcatcgtcctggaggctaaaaacctgaagaagatggacgtaggaggactgtcagatccatacgtcaaggtccacctgctgcagggcggcaaaaaggtgcggaagaagaaaaccaccatcaagaagaacactctgaacccctattacaacgaagctttcagcttcgaggtgccctgtgaccaagtccagaaggtgcaggtggagctgaccgtgctggactacgacaagctgggcaagaacgaggccatcgggnagggtggccgtgggggcggccgctcctatagtgagtcgtattaagctnattagctgagcttggactcctggtgatagatccagtaatgactcanactccatctggatttttcanaacgctcggttgccgccgggngttttttattngggaaaatccagctagcttgg

SEQ ID NO: 148 - DNA, 838 bp, Homo Sapiens
  misc_feature (1)..(3): n is a, c, g, or t
  misc_feature (707)..(707): n is a, c, g, or t
  misc_feature (734)..(734): n is a, c, g, or t
  misc_feature (743)..(744): n is a, c, g, or t
  misc_feature (768)..(768): n is a, c, g, or t
  misc_feature (777)..(777): n is a, c, g, or t
  misc_feature (791)..(791): n is a, c, g, or t
  misc_feature (793)..(793): n is a, c, g, or t
  misc_feature (804)..(804): n is a, c, g, or t
  misc_feature (809)..(809): n is a, c, g, or t
  misc_feature (817)..(817): n is a, c, g, or t
  misc_feature (820)..(821): n is a, c, g, or t
  misc_feature (824)..(824): n is a, c, g, or t
  misc_feature (836)..(836): n is a, c, g, or t
nnnctatgagaggatcgcatcaccatcaccatcacggatcctatttaggtgacactatagaatcgtcgacccacgcgtccgaagaatttcaggtgtcgtttcaggttcagaagtactgggaagtctgttcctttaatgaagtgcttgccagcaagtacgccaatgaaaatccaggggactttgtaaattacaacaaacgttttcttgctagggtttttcccagtccaatgagaattgattccagtaacatgaatcctcaagatttttggaaatgtggttgccaaattgtagccatgaactttcagacaccaggactgatgatggacctgaatattggctggtttaggcagaacggaaactgtggctatgtcctccggccagccatcatgagggaggaggtctccttcttcagcgccaatacaaaagactctgtcccaggggtctcacctcaacttcttcacattaaaatcatcagtgggcagaactttcccaagcccaaaggatcaggtgccaaaggtgatgtggtagatccttatgtctatgttgaaatccatggaatccctgctgattgtgcagaacaaaggacaaaaacagtgcaccagaatggagacgctcccattttttgatgaaagctttgaatttcaaatcaacctgcctgaactggccatggtgcgctttgtagtgctggatgatgactacattggggnatgaattcatcggccagtacacaattnccctttganngttacagacgggctaccgccatgncccccctgnagtccttaactggngngggccctggcnatgcnttctttanttnnccncgggggctattnac

SEQ ID NO: 149 - DNA, 786 bp, Homo Sapiens
  misc_feature (5)..(5): n is a, c, g, or t
  misc_feature (534)..(534): n is a, c, g, or t
  misc_feature (717)..(717): n is a, c, g, or t
  misc_feature (738)..(738): n is a, c, g, or t
  misc_feature (745)..(745): n is a, c, g, or t
  misc_feature (747)..(747): n is a, c, g, or t
  misc_feature (758)..(758): n is a, c, g, or t
  misc_feature (761)..(761): n is a, c, g, or t
  misc_feature (764)..(764): n is a, c, g, or t
  misc_feature (767)..(768): n is a, c, g, or t
  misc_feature (773)..(773): n is a, c, g, or t
  misc_feature (775)..(776): n is a, c, g, or t
  misc_feature (779)..(779): n is a, c, g, or t
ttaangaggagaattaactatgagaggatcgcatcaccatcaccatcacggatcctatttaggtgacactatagaatcgtcgacccacgcgtccgccatgagtagtggtggtggcagtggtggcggttatggcaatcaagaccagagtggtggaggtggcagcggtggctatggacagcaggaccgtggaggccgcggcaggggtggcagtggtggcggcggcggcggcggcggtggtggttacaaccgcagcagtggtggctatgaacccagaggtcgtggaggtggccgtggaggcagaggtggcatgggcggaagtgaccgtggtggcttcaataaatttggtggccctcgggaccaaggatcacgtcatgactccgaacaggataattcagacaacaacaccatctttgtgcaaggcctgggtgagaatgttacaattgagtctgtggctgattacttcaagcagattggtattattaagacaaacaagaaaacgggacagcccatgattaatttgtacacagacagggnaaactggcaagctgaagggagaggcaacggtctcttttgatgacccaccttcagctaaagcagctatttgactggtttgatggtaaaaaaattctccggaaatcctatcaaggtctcatttgctactcgccgggcagactttaaatcggggtggtggcaatggtcgtggagcccgagggcgangaggacccatgggccgtggangctatgnangtggtggcaantgntgntgnngcccnannagnattccca

SEQ ID NO: 150 - DNA, 943 bp, Homo Sapiens
  misc_feature (834)..(834): n is a, c, g, or t
  misc_feature (903)..(903): n is a, c, g, or t
  misc_feature (932)..(932): n is a, c, g, or t
attagaggaaattactatgagaggatcgcatcaccatcaccatcacggatcctatttaggtgacactatagaatcgtcgacccacgcgtccgcagagctgaagctttctgataatcctgcctgggaaggggataaaggaaacactaaaggtgacaagcacgatgacctccagcgggcgcgtttcatctgccccgttgtgggcctggagatgaacggccgacacaggttctgcttccttcggtgctgcggctgtgtgttttctgagcgagccttgaaagagataaaagcggaagtttgccacacgtgtggggctgccttccaggaggatgatgtcatcatgctcaatggcaccaaggaggatgtggacgtgctgaagacaaggatggaggagagaaggctgagagcgaagctggaaaagaaaacaaagaaacccaaggcagcagagtctgtttcaaaaccagatgtcagtgaagaagccccagggccatcaaaagttaagacagggaagcctgaagaagccagccttgattctagagagaagaaaaccaacttggctcccaaaagcacagcaatgaatgagagctcttctggaaaagctgggaagcctccgtgtggagccacaaagaggtccatcgctgacagtgaagaatcggaggcctacaagtccctctttaccactcacagctccgccaagcgctccaaggaggagtctgcccactgggtcacccacacgtcctactgcttctgaagcccgcactgccaccgctcctgccccagaaggttgtttagtttccacgtaggcaggtcgctttgtgcctctgagtgcgctgctgngtgttctctctatagttctgtgtcataaagctgtcctggccagccttcaagctggtgtggccccctctngatgtgaggcgtgtcggttccaggggganttgggaagggg

SEQ ID NO: 151 - DNA, 973 bp, Homo Sapiens
  misc_feature (803)..(803): n is a, c, g, or t
  misc_feature (811)..(811): n is a, c, g, or t
  misc_feature (844)..(844): n is a, c, g, or t
  misc_feature (896)..(896): n is a, c, g, or t
  misc_feature (900)..(900): n is a, c, g, or t
  misc_feature (912)..(912): n is a, c, g, or t
  misc_feature (921)..(921): n is a, c, g, or t
  misc_feature (923)..(923): n is a, c, g, or t
  misc_feature (929)..(929): n is a, c, g, or t
  misc_feature (933)..(933): n is a, c, g, or t
  misc_feature (940)..(940): n is a, c, g, or t
  misc_feature (945)..(945): n is a, c, g, or t
  misc_feature (947)..(947): n is a, c, g, or t
  misc_feature (953)..(953): n is a, c, g, or t
  misc_feature (956)..(956): n is a, c, g, or t
  misc_feature (961)..(961): n is a, c, g, or t
  misc_feature (964)..(964): n is a, c, g, or t
  misc_feature (967)..(967): n is a, c, g, or t
  misc_feature (969)..(969): n is a, c, g, or t
atagagagaatactatgagaggatcgcatcaccatcaccatcacggatcctatttaggtgacactatagaatcgtcgacccacgcgtccggagaagccgctggcggcagtcacttgtacagcgccggtcaacatcgcggtcatcaagtactagatggggtttcaccgtgttggccaggctggtctgaagctcctgacctcgtgatctgcccacctcagcctcccaaagtgctgggattacagactgtcactgcgacacccaggctggagtgcaatggcgtgatctcggctcactgcaacctccgcttcccgggttcaaccgattctcctgcctcagcctctcgagtagctgggactacagggggcaagcgcgatgaagagctggttctgcccatcaactcctccctgagcgtcactctgcaccaggaccagttaaaaaccaccacaacagccgtcatcagcaaggacttcaccgaggaccggatttggctgaatggccgggaggaggatgtggggcagccgaggctgcaggcctgcctgcgggagatccgctgcctggcccggaagcggaggaactcacgggatggggacccgctgccctccagcctcagctgcaaggtgcacgtggcatcggtgaacaacttccccacggctgcgggcctggcctcctcagcggcgggctatgcctgcctagcctacaccctggcccgtgtctacggcgtggagagtgacctctcagaagtggctcgccggggctcaggcagcgcctgccggagcctgtatgggggctttgtggagtggcanatgggaanagcaggccgacgggaaggacagcatcgctcggnaagtggcccccgagtcacactggcctgaactccgcgtgctcatccttgtggngagngctgaaaaaaanctgacaggnantaccgngggnatgcggnccagngnggaaancanccccntgnttngnttcc

SEQ ID NO: 152 - DNA, 327 bp, Homo Sapiens
  misc_feature (5)..(8): n is a, c, g, or t
  misc_feature (10)..(10): n is a, c, g, or t
  misc_feature (12)..(17): n is a, c, g, or t
  misc_feature (20)..(23): n is a, c, g, or t
  misc_feature (25)..(25): n is a, c, g, or t
  misc_feature (27)..(27): n is a, c, g, or t
  misc_feature (34)..(34): n is a, c, g, or t
  misc_feature (36)..(36): n is a, c, g, or t
  misc_feature (56)..(56): n is a, c, g, or t
  misc_feature (70)..(70): n is a, c, g, or t
  misc_feature (226)..(226): n is a, c, g, or t
  misc_feature (228)..(228): n is a, c, g, or t
  misc_feature (238)..(238): n is a, c, g, or t
  misc_feature (251)..(251): n is a, c, g, or t
  misc_feature (262)..(262): n is a, c, g, or t
  misc_feature (275)..(275): n is a, c, g, or t
  misc_feature (282)..(283): n is a, c, g, or t
  misc_feature (285)..(285): n is a, c, g, or t
  misc_feature (298)..(298): n is a, c, g, or t
  misc_feature (300)..(300): n is a, c, g, or t
  misc_feature (307)..(307): n is a, c, g, or t
  misc_feature (314)..(314): n is a, c, g, or t
  misc_feature (318)..(318): n is a, c, g, or t
agggnnnngncnnnnnnggnnnncncncctcccncnaccttaaagaggagaattanctatgagaggatcncatcaccatcaccatcacggatcctatttaggtgacactatagaatctgtcgacccacgcgtccggcgggagcggagtagcggaccccagagagcactgcgcagccccaccgccgccgccggcctagttaccatcacaccccgggaggagccaacncnatgccgcagncgaacccagccancatcaccgcanccatgcagcagcnaaggacnnanacccagatagccncnacgcccnccccccncgcngaaccccgc

SEQ ID NO: 153 - DNA, 779 bp, Homo Sapiens
  misc_feature (758)..(758): n is a, c, g, or t
ttaactatgagaggatcgcatcaccatcaccatcacggatcctatttaggtgacactatagaatcgtcgacccacgcgtccgcgctgcgctccgagcgtctgatccgtacctcgctggacctggagttagacctgcaggcgacaagaacctggcacagccaactgacccaggagatctcggtgctgaaggagctcaaggagcagctggaacaagccaagagccacggggagaaggagctgccacagtggttgcgtgaggacgagcgtttccgcctgctgctgaggatgctggagaagcggcagatggaccgagcggagcacaagggtgagcttcagacagacaagatgatgagggcagctgccaaggatgtgcacaggctccgaggccagagctgtaaggaacccccagaagttcagtctttcagggagaagatggcatttttcacccggcctcggatgaatatcccagctctctctgcagatgacgtctaatcgccagaaaagtatttcctttgttccactgaccaggctgtgaacattgactgtggctaaagttatttatgtggtgttatatgaaggtactgagtcacaagtcctctagtgctcttgttggtttgaagatgaaccgactttttagtttgggtcctactgttgttattaaaaacagaacaaaaacaaaacacacacacacacaaaaacagaaacaaaaaaaaccagcattaaaataataagattgtatagtttgtatatttaggagngtatttttgggaaagaaaatt

SEQ ID NO: 154 - DNA, 819 bp, Homo Sapiens
  misc_feature (3)..(3): n is a, c, g, or t
  misc_feature (645)..(645): n is a, c, g, or t
  misc_feature (747)..(747): n is a, c, g, or t
  misc_feature (752)..(752): n is a, c, g, or t
  misc_feature (768)..(768): n is a, c, g, or t
  misc_feature (812)..(812): n is a, c, g, or t
  misc_feature (815)..(815): n is a, c, g, or t
atnactatgagaggatcgcatcaccatcaccatcacggatcctatttaggtgacactatagaatcgtcgacccacgcgtccggccaactctcgcactctgttcttccgccgctccgccgtcgcgtttctctgccggtcgcaatggaagaagagatcgccgcgctggtcattgacaatggctccggcatgtgcaaagctggttttgctggggacgacgctccccgagccgtgtttccttccatcgtcgggcgccccagacaccagggcgtcatggtgggcatgggccagaaggactcctacgtgggcgacgaggcccagagcaagcgtggcatcctgaccctgaagtaccccattgagcatggcatcgtcaccaactgggacgacatggagaagatctggcaccacaccttctacaacgagctgcgcgtggccccggaggagcacccagtgctgctgaccgaggcccccctgaaccccaaggccaacagagagaagatgactcagattatgtttgagaccttcaacaccccggccatgtacgtggccatccaggccgtgctgtccctctacgcctctgggcgcaccactggcattgtcatggactctggagacggggtcacccacacggtgcccatctacgagggntacgccctcccccacgccatcctgcgtctggacctggctggccgggacctgaccgactacctcatgaagatcctcactgagcgaggctacagcttcaccacnacggncgagcgggaaaatcgngcgcgacatcaaggagaagctgtgctacgtcgccctggacttcnagnagga

SEQ ID NO: 155 - DNA, 806 bp, Homo Sapiens
  misc_feature (2)..(2): n is a, c, g, or t
  misc_feature (4)..(4): n is a, c, g, or t
  misc_feature (781)..(781): n is a, c, g, or t
tnanctatgagaggatcgcatcaccatcaccatcacggatcctatttaggtgacactatagaatcgtcgacccacgcgtccgcgtatgttcactcgtctgccaccatcccattggatgaccccactttgctctttgccaatgcaggcatgaaccagtttaaacccattttcctgaacacaattgacccatctcaccccatggcaaagctgagcagagctgccaatacccagaagtgcatccgggctgggggcaaacataatgacctggacgatgtgggcaaggatgtctatcatcacaccttcttcgagatgctgggctcttggtcttttggagattactttaaggaattggcatgtaagatggctctggaactcctcacccaagagtttggcattcccattgaaagactttatgttacttactttggcggggatgaagcagctggcttagaagcagatctggaatgcaaacagatctggcaaaatttggggctggatgacaccaaaatcctcccaggcaacatgaaggataacttctgggagatgggtgacacgggcccctgtggtccttgcagtgagatccactacgaccggattggtggtcgggacgccgcacatcttgtcaaccaggacgaccctaatgtgctggagatctggaaccttgtgttcatccagtataacagggaagctgatggcattctgaaacctcttcccaagaaaagcattgacacagggatgggcctggaacgactggtatctgtgctgcagaataagatgtccnactatgacactgacctttttgtccc

SEQ ID NO: 156 - DNA, 772 bp, Homo Sapiens
  misc_feature (2)..(2): n is a, c, g, or t
  misc_feature (4)..(4): n is a, c, g, or t
  misc_feature (590)..(590): n is a, c, g, or t
  misc_feature (592)..(592): n is a, c, g, or t
  misc_feature (604)..(604): n is a, c, g, or t
  misc_feature (619)..(619): n is a, c, g, or t
  misc_feature (635)..(635): n is a, c, g, or t
  misc_feature (651)..(651): n is a, c, g, or t
  misc_feature (668)..(668): n is a, c, g, or t
  misc_feature (671)..(671): n is a, c, g, or t
  misc_feature (686)..(686): n is a, c, g, or t
  misc_feature (695)..(695): n is a, c, g, or t
  misc_feature (712)..(712): n is a, c, g, or t
  misc_feature (725)..(725): n is a, c, g, or t
  misc_feature (727)..(727): n is a, c, g, or t
  misc_feature (730)..(730): n is a, c, g, or t
  misc_feature (733)..(733): n is a, c, g, or t
  misc_feature (738)..(738): n is a, c, g, or t
  misc_feature (745)..(745): n is a, c, g, or t
  misc_feature (752)..(752): n is a, c, g, or t
  misc_feature (756)..(756): n is a, c, g, or t
  misc_feature (761)..(762): n is a, c, g, or t
  misc_feature (764)..(764): n is a, c, g, or t
  misc_feature (767)..(768): n is a, c, g, or t
tnanaggagaattaactatgagaggatcgcatcaccatcaccatcacggatcctatttaggtgacactatagaatcgtcgacccacgcgtccgcccacgcgtccgggcgcggagacgcttctggaaggaacgccgcgatggctgcgcagggagagccccaggtccagttcaaacttgtattggttggtgatggtggtactggaaaaacgaccttcgtgaaacgtcatttgactggtgaatttgagaagaagtatgtagccaccttgggtgttgaggttcatcccctagtgttccacaccaacagaggacctattaagttcaatgtatgggacacagccggccaggagaaattcggtggactgagagatggctattatatccaagcccagtgtgccatcataatgtttgatgtaacatcgagagttacttacaagaatgtgcctaactggcatagagatctggtacgagtgtgtgaaaacatccccattgtgttgtgtggcaacaaagtggatattaaggacaggaaagtgaaggcgaaatccattgtcttccaccgaaaagaagaatcttcagtactacgacatttctgncnaaagtaactacnactttgaaaagcccntcctctggcttgctangaagctcattggagancctaacttggaatttgntgncatgcctgctctccncccccccanaagttgtcatggacccngcttttggcagcncngtntgngcccncatttanagggtgntcanaaaanngnttnncccg

SEQ ID NO: 157 - DNA, 791 bp, Homo Sapiens
  misc_feature (702)..(702): n is a, c, g, or t
  misc_feature (759)..(759): n is a, c, g, or t
  misc_feature (763)..(763): n is a, c, g, or t
  misc_feature (769)..(769): n is a, c, g, or t
  misc_feature (772)..(772): n is a, c, g, or t
  misc_feature (784)..(784): n is a, c, g, or t
ttaactatgagaggatcgcatcaccatcaccatcacggatcctatttaggtgacactatagaatcgtcgacccacgcgtccgcggagcggagacgggagtattatgaaaagatcaagaaggacccagcccagttcctgcaggtacatggccgagcttgcaaggtgcacctggattctgcagtcgccctggccgctgagagccctgttaatatgatgccctggcagggggacaccaacaacatgattgaccgattcgatgtccgtgcccacctggaccacatccccgactacaccccccctctgctcaccaccatctccccagaacaggagtcggacgaacggaagtgtaactacgagcgctacagaggcctggtgcagaacgactttgccggcatctcagaggagcagtgcctgtaccagatctacattgatgagttgtacggaggcctccagagacccagcgaagatgagaagaagaagctggcagagaagaaggcttccatcggttatacctacgaggacagcacggtggccgaggtagagaaggcggcagaaaagccagaggaggaggagtcagcggccgaggaggagagcaactcggacgaagatgaggtcatccccgacatcgacgtggaggtggacgtggatgaattgaaccaggagcaggtggcagatctcaacaaacaggccacgacttatggnatggcccgacggtgacttcgctcagggatgctccggaaaagacaaggagggaggcanaggnccatcnagnatggccaaggtntcttgga

SEQ ID NO: 158 - DNA, 805 bp, Homo Sapiens
  misc_feature (2)..(2): n is a, c, g, or t
  misc_feature (4)..(4): n is a, c, g, or t
  misc_feature (6)..(6): n is a, c, g, or t
  misc_feature (735)..(735): n is a, c, g, or t
  misc_feature (767)..(767): n is a, c, g, or t
  misc_feature (788)..(788): n is a, c, g, or t
tnangnggagaattaactatgagaggatcgcatcaccatcaccatcacggatcctatttaggtgacactatagaatcgtcgacccacgcgtccggcgcggagttcaggaaatggaaggcgcaatgtttgagcaaagcggacctcagccggaagggcagtgttgacgaggatgtggtagagcttgtgcagtttctgaacatgcgagatcagtttttcaccaccagctcctgcgctggccgcatcctactccttgaccggggtataaatggttttgaggttcagaaacaaaactgttgctggctactggttacacacaaactttgtgtaaaagatgatgtgattgtagctctgaagaaagcaaatggtgatgccactttgaaatttgaaccatttgttcttcatgtgcagtgtcgacaattgcaggatgcacagattctgcattccatggcaatagattctggtttcaggaactctggcataacggtgggaaagagaggaaaaactatgttggctgtccggagtacacatggcttagaagttccattaagccataagggaaaactgatggtgacagaggaatatattgacttcctgttaaatgtggcaaatcaaaaaatggaggaaaacaagaaaagaattgagaggttttacaactgcctacagcatgctttggaaagggaaacgatgactaacttacatcccaagatcaaagagaaaaataactcatcatatatncataagaaaaaagaacccagaaaaaaacgtgncccgggtattctaaagaaagnatgaagaacttgaaaag

SEQ ID NO: 159 - DNA, 840 bp, Homo Sapiens
  misc_feature (685)..(685): n is a, c, g, or t
  misc_feature (737)..(737): n is a, c, g, or t
  misc_feature (740)..(740): n is a, c, g, or t
  misc_feature (744)..(744): n is a, c, g, or t
  misc_feature (783)..(783): n is a, c, g, or t
  misc_feature (786)..(786): n is a, c, g, or t
  misc_feature (794)..(794): n is a, c, g, or t
  misc_feature (796)..(797): n is a, c, g, or t
  misc_feature (815)..(815): n is a, c, g, or t
  misc_feature (818)..(818): n is a, c, g, or t
  misc_feature (829)..(829): n is a, c, g, or t
  misc_feature (838)..(839): n is a, c, g, or t
tcttaaagaggagaattaactatgagaggatcgcatcaccatcaccatcacggatcctatttaggtgacactatagaatcgtcgacccacgcgtccgcggacgcgtgggtgagcatcatggcaaccgttacagccacaaccaaagtcccggagatccgtgatgtaacaaggattgagcgaatcggtgcccactcccacatccggggactggggctggacgatgccttggagcctcggcaggcttcgcaaggcatggtgggtcagctggcggcacggcgggcggctggcgtggtgctggagatgatccgggaagggaagattgccggtcgggcagtccttattgctggccagccgggcacggggaagacggccatcgccatgggcatggcgcaggccctgggccctgacacgccattcacagccatcgccggcagtgaaatcttctccctggagatgagcaagaccgaggcgctgacgcaggccttccggcggtccatcggcgttcgcatcaaggaggagacggagatcatcgaaggggaggtggtggagatccagattgatcgaccagcaacagggacgggctccaaggtgggcaaactgaccctcaagaccacagagatggagaccatctacgacctgggcaccaagatgattgagtccctgaccaaggacaaggtccaggccnggggacgtgatcaccatcgacaaggggacggggcaagatctcaaagctgggncgntccnttcacacgcgcccgcgaatacgacgctatgggctcccanaanaagttcgngnngggcccagatggggagcncanaaccgcaaggngggggggcnnc

SEQ ID NO: 160 - DNA, 998 bp, Homo Sapiens
  misc_feature (6)..(6): n is a, c, g, or t
  misc_feature (531)..(531): n is a, c, g, or t
  misc_feature (628)..(628): n is a, c, g, or t
  misc_feature (719)..(719): n is a, c, g, or t
  misc_feature (727)..(727): n is a, c, g, or t
  misc_feature (742)..(742): n is a, c, g, or t
  misc_feature (765)..(765): n is a, c, g, or t
  misc_feature (767)..(767): n is a, c, g, or t
  misc_feature (771)..(771): n is a, c, g, or t
  misc_feature (782)..(782): n is a, c, g, or t
  misc_feature (791)..(791): n is a, c, g, or t
  misc_feature (802)..(802): n is a, c, g, or t
  misc_feature (806)..(806): n is a, c, g, or t
  misc_feature (837)..(838): n is a, c, g, or t
  misc_feature (846)..(846): n is a, c, g, or t
  misc_feature (849)..(849): n is a, c, g, or t
  misc_feature (854)..(854): n is a, c, g, or t
  misc_feature (860)..(860): n is a, c, g, or t
  misc_feature (862)..(862): n is a, c, g, or t
  misc_feature (864)..(864): n is a, c, g, or t
  misc_feature (872)..(872): n is a, c, g, or t
  misc_feature (882)..(882): n is a, c, g, or t
  misc_feature (902)..(902): n is a, c, g, or t
  misc_feature (908)..(908): n is a, c, g, or t
  misc_feature (911)..(911): n is a, c, g, or t
  misc_feature (931)..(931): n is a, c, g, or t
  misc_feature (933)..(933): n is a, c, g, or t
  misc_feature (936)..(938): n is a, c, g, or t
  misc_feature (946)..(946): n is a, c, g, or t
  misc_feature (950)..(950): n is a, c, g, or t
  misc_feature (967)..(967): n is a, c, g, or t
  misc_feature (988)..(988): n is a, c, g, or t
  misc_feature (990)..(990): n is a, c, g, or t
  misc_feature (997)..(997): n is a, c, g, or t
tagagnaattaactatgagaggatcgcatcaccatcaccatcacggatcctatttaggtgacactatagaatcgtcgacccacgcgtccgggcccgcccgcgcccgtccgcagccgcccgccagacgcgcccagtatgagggagatcgtgcacatccaggccggccagtgcggcaaccagatcggggccaagttctgggaagtcatcagtgatgagcatggcatcgaccccagcggcaactacgtgggcgactcggacttgcagctggagcggatcagcgtctactacaacgaggcctcttctcacaagtacgtgcctcgagccattctggtggacctggaacccggaaccatggacagtgtccgctcaggggcctttggacatctcttcaggcctgacaatttcatctttggtcagagtggggccggcaacaactgggccaagggtcactacacggagggggcggagctggtggattcggtcctggatgtggtgcggaaggagtgtgaaaactgcgactgcctgcagggnttccagctgacccactcgctggggggcggcacgggctccggcatgggcacgttgctcatcagcaaggtgcgtgaggagtatcccgaccgcatcatgnacaccttcagcgtcgtgccctcacccaaggtgtcagacacggtggtggagccctacaaacgccacgttgtccatccaccagctgggggganaacacggnatgaaaacctactgnatcgacaacgagggggctctacnanattntggtttccggnaccctcaangttgggccacncccnacctaacgggggaactccaaccaccctggtnntcggcccnccnatggnggggantncncccccctnccttttgggnttttcccgggggccaagttnaaaagnttnaacctggggcaaaaggttgngnccnnnaaaaaaangggngggcccttttcccgggnccttggaaatttttttttttngncccgggnt

SEQ ID NO: 161 - DNA, 131 bp, Homo Sapiens
  misc_feature (11)..(11): n is a, c, g, or t
  misc_feature (97)..(97): n is a, c, g, or t
  misc_feature (101)..(101): n is a, c, g, or t
  misc_feature (103)..(103): n is a, c, g, or t
  misc_feature (109)..(109): n is a, c, g, or t
  misc_feature (111)..(111): n is a, c, g, or t
  misc_feature (118)..(119): n is a, c, g, or t
  misc_feature (121)..(121): n is a, c, g, or t
  misc_feature (125)..(126): n is a, c, g, or t
ctattagaggnaattaactatgagaggatcgcatcaccatcaccatcacggtatcctatttaggtgacactatagaatcgtcgacccacgcgtccgncaangngtttgngntcccccnncnatgnntgacg

SEQ ID NO: 162 - DNA, 1003 bp, Homo Sapiens
  misc_feature (1)..(1): n is a, c, g, or t
  misc_feature (3)..(3): n is a, c, g, or t
  misc_feature (112)..(112): n is a, c, g, or t
  misc_feature (327)..(327): n is a, c, g, or t
  misc_feature (371)..(371): n is a, c, g, or t
  misc_feature (765)..(765): n is a, c, g, or t
  misc_feature (802)..(802): n is a, c, g, or t
  misc_feature (805)..(805): n is a, c, g, or t
  misc_feature (808)..(808): n is a, c, g, or t
  misc_feature (833)..(833): n is a, c, g, or t
  misc_feature (857)..(857): n is a, c, g, or t
  misc_feature (864)..(864): n is a, c, g, or t
  misc_feature (868)..(868): n is a, c, g, or t
  misc_feature (870)..(870): n is a, c, g, or t
  misc_feature (875)..(875): n is a, c, g, or t
  misc_feature (883)..(883): n is a, c, g, or t
  misc_feature (889)..(889): n is a, c, g, or t
  misc_feature (898)..(898): n is a, c, g, or t
  misc_feature (904)..(904): n is a, c, g, or t
  misc_feature (912)..(912): n is a, c, g, or t
  misc_feature (915)..(915): n is a, c, g, or t
  misc_feature (917)..(917): n is a, c, g, or t
  misc_feature (935)..(935): n is a, c, g, or t
  misc_feature (951)..(951): n is a, c, g, or t
  misc_feature (966)..(966): n is a, c, g, or t
  misc_feature (969)..(971): n is a, c, g, or t
  misc_feature (982)..(983): n is a, c, g, or t
  misc_feature (989)..(990): n is a, c, g, or t
  misc_feature (992)..(993): n is a, c, g, or t
  misc_feature (1002)..(1002): n is a, c, g, or t
ntnagagaaattactatgagaggatcgcatcaccatcaccatcacggatcctatttaggtgacactatagaatcgtcgacccacgcgttccgctgaagcaggcgctcttggntcggcgcggcccgctgcaatccgtggaggaacgcgccgccgagccaccatcatgcctgggcacttacaggaaggcttcggctgcgtggtcaccaaccgattcgaccagttatttgacgacgaatcggaccccttcgaggtgctgaaggcagcagagaacaagaaaaaagaagccggcgggggcggcgttgggggccctggggccaagagcgcagntcaggccgcggcccagaccaactccaacgcggcaggcaaacagntgcgcaaggagtcccagaaagaccgcaagaacccgctgccccccagcgttggcgtggttgacaagaaagaggagacgcagccgcccgtggcgcttaagaaagaaggaataagacgagttggaagaagacctgatcaacaacttcagggtgaagggaaaataattgatagaagaccagaaaggcgaccacctcgtgaacgaagattcgaaaagccacttgaagaaaagggtgaaggaggcgaattttcagttgatagaccgattattgaccgacctattcgaggtcgtggtggtcttggaagaggtcgagggggccgtggacgtggaatgggccgaggaaatggatttgattctcgtggcaaacgtgaatttgataggcatagtggaagtgatanatctggcctgaagcacgaggacaaacgtggaggtagnggnatntcacaactggggaaactgttcaaanacgaatttaacagaagtccccccnaaatacntttnanaaaanaaattttntttttnaatttaccnggggantttgggantcnantcaaaatggtgaactggnaggaaaaccccctggnaagggggaaaaaaanttnnntcccggggggnnaaaccnntnnaaaattaang

SEQ ID NO: 163 - DNA, 1160 bp, Homo Sapiens
  misc_feature (1)..(1): n is a, c, g, or t
  misc_feature (3)..(3): n is a, c, g, or t
  misc_feature (889)..(889): n is a, c, g, or t
  misc_feature (940)..(940): n is a, c, g, or t
  misc_feature (964)..(964): n is a, c, g, or t
  misc_feature (994)..(994): n is a, c, g, or t
  misc_feature (1007)..(1007): n is a, c, g, or t
  misc_feature (1010)..(1010): n is a, c, g, or t
  misc_feature (1021)..(1021): n is a, c, g, or t
  misc_feature (1031)..(1031): n is a, c, g, or t
  misc_feature (1056)..(1056): n is a, c, g, or t
  misc_feature (1059)..(1059): n is a, c, g, or t
  misc_feature (1071)..(1071): n is a, c, g, or t
  misc_feature (1077)..(1077): n is a, c, g, or t
  misc_feature (1082)..(1082): n is a, c, g, or t
  misc_feature (1109)..(1109): n is a, c, g, or t
  misc_feature (1113)..(1113): n is a, c, g, or t
  misc_feature (1119)..(1119): n is a, c, g, or t
  misc_feature (1123)..(1124): n is a, c, g, or t
  misc_feature (1138)..(1138): n is a, c, g, or t
  misc_feature (1143)..(1143): n is a, c, g, or t
  misc_feature (1145)..(1145): n is a, c, g, or t
  misc_feature (1149)..(1149): n is a, c, g, or t
  misc_feature (1160)..(1160): n is a, c, g, or t
nanttgagaaattactatgagaggatcgcatcaccatcaccatcacggatcctatttaggtgacactatagaatcgtcgacccacgcgtccgcctggatgagcaggagctggaggcactcttcaccaaggagctggagaaagtgtacgacccaaagaatgaggaggacgacatgcgggagatggaggaggagcgactgcgcatgcgggagcatgtgatgaagaatgtggacaccaaccaggaccgcctcgtgaccctggaggagttcctcgcatccactcagaggaaggagtttggggacaccggggagggctgggagacagtggagatgcaccctgcctacaccgaggaagagctgaggcgctttgaagaggagctggctgcccgggaggcagagctgaatgccaaggcccagcgcctcagccaggagacagaggctctagggcggtcccagggccgcctggaggcccagaagagagagctgcagcaggctgtgctgcacatggagcagcggaagcagcagcagcagcagcagcaaggccacaaggccccggctgcccaccctgaggggcagctcaagttccacccagacacagacgatgtacctgtcccagctccagccggtgaccagaaggaggtggacacttcagaaaagaaacttctcgagcggctccctgaggttgaggtgccccagcatctgtgatcctccgggaccccagccctcaggattcctgatgctccaaggcgactgatgggcgctggatgaagtggcacagtcagcttccctgggggccggtgtcatgttgggctcctggggcgggggcacggcctggcatttcacgcattgctgccaccccagatccacctgtctccactttcacagcctccangtctgtggctcttcccttctgtcctccgagggcttgccttctctcgtgtcngtgaggtgctcagtgatcggcttnacttaaagaacccgccccctccctttttcnttctgtcccaaanggntctgctctgancctgcgttcntaggtggctcgcctcactgcctggnttnggccccctaacntctgtntgccnaagttttggattcccgttttgttcagncaanttttgntttnnatgggggctggggngtccncnaacntccctcttttn

SEQ ID NO: 164 - DNA, 1008 bp, Homo Sapiens
  misc_feature (735)..(735): n is a, c, g, or t
  misc_feature (779)..(779): n is a, c, g, or t
  misc_feature (798)..(798): n is a, c, g, or t
  misc_feature (812)..(812): n is a, c, g, or t
  misc_feature (817)..(817): n is a, c, g, or t
  misc_feature (826)..(826): n is a, c, g, or t
  misc_feature (834)..(834): n is a, c, g, or t
  misc_feature (836)..(836): n is a, c, g, or t
  misc_feature (865)..(865): n is a, c, g, or t
  misc_feature (876)..(876): n is a, c, g, or t
  misc_feature (881)..(881): n is a, c, g, or t
  misc_feature (883)..(883): n is a, c, g, or t
  misc_feature (909)..(909): n is a, c, g, or t
  misc_feature (923)..(923): n is a, c, g, or t
  misc_feature (931)..(932): n is a, c, g, or t
  misc_feature (937)..(938): n is a, c, g, or t
  misc_feature (942)..(944): n is a, c, g, or t
  misc_feature (948)..(948): n is a, c, g, or t
  misc_feature (959)..(961): n is a, c, g, or t
  misc_feature (964)..(964): n is a, c, g, or t
  misc_feature (973)..(973): n is a, c, g, or t
  misc_feature (980)..(980): n is a, c, g, or t
  misc_feature (983)..(983): n is a, c, g, or t
  misc_feature (1006)..(1006): n is a, c, g, or t
ttagagaaattactatgagaggatcgcatcaccatcaccatcacggatcctatttaggtgacactatagaatcgtcgacccacgcgttccgcggacgcgtgggcggacgcgtgggcggagcccgaaccccgcagcctgagccacctccgtcatctgggcccggggcctcaccgcgcaggagctgccaaggccatgtctgttccatcatcactgagccagtcggccattaatgccaacagccacggaggccccgcactgagcctacccctgcctctgcacgctgcccacaaccagctgctcaacgccaagctgcaggccacagctgtgggacccaaggacctgcgcagcgccatgggggagggtggtgggcctgagccaggccctgccaatgccaagtggctaaaagagggccagaaccagctccggcgggccgccacggcccaccgtgaccagaatcgcaatgtgaccttgaccttggcggaggaggccagccaggagcctgagatggcacccttgggccccaaaggcctgatacacctgtactctgagctggagctctcagctcacaacgcagccaaccgaggcctacgaggacctggcctgatcatcagcactcaagagcaggggccagatgagggagaggagaaggcggccggggaggccgaggaggaggaggaggatgatgatgatgaagaggaggaggaggacttatcttctcccccagggctgcctgancccctggagagtgtggaggcccctcccaggccccaagcccttanagatggcccccgggaacanagcaagagtgccancctcntgtttggcntgcgaaanantgcaaccagtgatgagactcaagctgggntactttatccnagggnancccttcttatggctccccaaaagaanaaaattctttttgnaaccccannccttnnaaannnattnccaacttgccnnntgnatgattaangttccanaanccttcagggaactttttattggnat

SEQ ID NO: 165 - DNA, 1098 bp, Homo Sapiens
  misc_feature (1)..(1): n is a, c, g, or t
  misc_feature (3)..(3): n is a, c, g, or t
  misc_feature (900)..(901): n is a, c, g, or t
  misc_feature (912)..(912): n is a, c, g, or t
  misc_feature (927)..(927): n is a, c, g, or t
  misc_feature (936)..(936): n is a, c, g, or t
  misc_feature (941)..(941): n is a, c, g, or t
  misc_feature (979)..(979): n is a, c, g, or t
  misc_feature (1011)..(1011): n is a, c, g, or t
  misc_feature (1017)..(1018): n is a, c, g, or t
  misc_feature (1020)..(1020): n is a, c, g, or t
  misc_feature (1030)..(1030): n is a, c, g, or t
  misc_feature (1032)..(1032): n is a, c, g, or t
  misc_feature (1036)..(1039): n is a, c, g, or t
  misc_feature (1041)..(1041): n is a, c, g, or t
  misc_feature (1051)..(1051): n is a, c, g, or t
  misc_feature (1059)..(1059): n is a, c, g, or t
  misc_feature (1061)..(1061): n is a, c, g, or t
  misc_feature (1066)..(1067): n is a, c, g, or t
  misc_feature (1077)..(1077): n is a, c, g, or t
  misc_feature (1088)..(1088): n is a, c, g, or t
  misc_feature (1090)..(1090): n is a, c, g, or t
  misc_feature (1093)..(1093): n is a, c, g, or t
  misc_feature (1095)..(1095): n is a, c, g, or t
nantagagaaattactatgagaggatcgcatcaccatcaccatcacggatcctatttaggtgacactatagaatcgtcgacccacgcgtccgcccggaagtgcccgcgcagccggtttccggtgcaggtggggaaaatggcggtgtctacagtgttctcgacttcgtcgctgatgcttgctctgtcaaggcacagcctattgtctcctttgctcagtgtgacatcattcagacgcttctacagaggtgacagcccaacagattcccaaaaggacatgattgaaatccctttgcctccatggcaggagagaactgatgaatccatagaaaccaaaagagcccgcctgctctatgagagcagaaagaggggaatgttggaaaactgcattcttcttagtctttttgctaaagaacatctgcagcacatgacagaaaagcagctgaacctctatgaccgcctgattaacgagcctagtaatgactgggatatttactactgggccacaggtgactgggtacctggatatgtgatcgagtattcttctgggtgtttctatgaggatgtttttggatgaaattggcatttaaattggtaaactgagtaaagcagtctgtccccctaaccggggtgggcttcatgtaatcagctcaaggtttgaatacaacaaaaagacttacactctcgcaagtgaaaggcaattctttctgcctggtagccttcaaactgagacacaggcttttatcctgccttcagattcgcctgggaacactggctcttcctgagtctcaagcctgctggccttgagacaagaactacatcagctctctcagttctcaagcctttggacttactctggaactaagccatcagctctcttgggtcgtcagcttgccaaccaanntcatcctgaanatcttgggacttgcnagccttcanagtcncgtgggccaattcctttttttttttttttttttgaaanggggtcttactctgttgcccaggctggactgnaatggnncnaattatggcncnttgnnnntncaacctccangggtttgngngatcnncccccccccncccccccaagnanctngnaat

SEQ ID NO: 166 - DNA, 1401 bp, Homo Sapiens
  misc_feature (926)..(927): n is a, c, g, or t
  misc_feature (973)..(973): n is a, c, g, or t
  misc_feature (1035)..(1035): n is a, c, g, or t
cgccctaaggatactagagaggatgcatcaccatcaccatcacggtcgacccacgcgtccgaagaagcccagccccttcatcttcatcagccagcgtccctccccagagacccaagacaccatccacccgcttgatgaggaggcctttttgaaggtgtccccagagctgaagaacttggacctgcacggcagcacagacagtggctttggcagcaccaagccatccctgcagactgaagagccccagttcctcctccctgaccctcacccccaggctgacagaacgctgggaaacagggagccccctgtgctgggggacagctgcagtagtggcagcagcaatagcacagacagcgggatctgcctgcaggagcccagcctgagccccagcacagggcccacctgggagcaacaggtggggagcaacagcaggggccaggatgacagtggcattgacttagttcaaaactctgagggccgggctggggacacacagggtggctcggccttgggccaccacagtcccccggagcctgaggtgcctggggaagaagacccagctgctgtggcattccagggttacctgaggcagaccagatgtgctgaagagaaggcaaccaagacaggctgcctggaggaagaatcgcccttgacagatggccttggccccaaattcgggagatgcctggttgatgaggcaggcttgcatccaccagccctggccaagggctatttgaaacaggatcctctagaaatgactctggcttcctcaggggccccaacgggacagtggaaccagcccactgaggaatggtcactcctggccttgagcagctgcagtgacctgggaatatctgactggagctttgcccatgaccttgcccctctaggctgtgtggcagccccaggtggtctcctgggcagcnnttactcagacctggtcaccctgcccctcatctctagcctgcagtcnagtgagtgactcgggctgagaggctgcttttgattttagccatgcctgctcctcctgctggnaccaggagaggcccctgggggcagaagtaggcacgaagcagtctgggcactttctgcagtcacccgggggctggcccagcaagccttcaaggtttgtaaggtgtttgggcaaggaggagccaatcctgaactaggccaggaattggttgggcttaccttttcttgtaattggccctccaaatctggaaaactaaaaaggcaggaccttttccccccaaaaacccttctgatttaaagagtttttctccggaaccaggggtttcgcgatttggggggccccctgtaaaacctccaacacaccctcgttttgcccccacataaaattctcgagaaaagaccgtaaaaaactctacgccctctgtggct

SEQ ID NO: 167 - DNA, 1394 bp, Homo Sapiens
  misc_feature (1)..(2): n is a, c, g, or t
  misc_feature (14)..(14): n is a, c, g, or t
  misc_feature (879)..(879): n is a, c, g, or t
nncccgcacccccncctaagaatactagagaggatgcatcaccatcaccatcacggtcgacccacgcgtccgcccacagccgagcagctggcccagattgcagcggagaacgaggaggatgagcactcggtcaactacaagcccccggcccagaagagcatccaggagatccaggagctggacaaggacgacgagagcctgcgaaagtacaaggaggccctgctgggccgcgtggccgtttccgcagaccccaacgtccccaacgtcgtggtgactggcctgaccctggtgtgcagctcggccccgggccccctggagctggacctgacgggcgacctggagagcttcaagaagcagtcgtttgtgctgaaggagggtgtggagtaccggataaaaatctctttccgggttaaccgagagatagtgtccggcatgaagtacatccagcatacgtacaggaaaggcgtcaagattgacaagactgactacatggtaggcagctatgggccccgggccgaggagtacgagttcctgacccccgtggaggaggcacccaagggtatgctggcccggggcagctacagcatcaagtcccgcttcacagacgacgacaagaccgaccacctgtcctgggagtggaatctcaccatcaagaaggactggaaggactgagcccagccagaggcgggcagggcagactgacggacggacgacggacaggcggatgtgtcccccccagcccctcccctccccataccaaagtgctgacaggccctccgtgcccctcccaccctggtccgcctccctggcctggctcaaccgagtgcctccgacccccctcctcagcccctcccccaccacaggcccagcctcctcggnctccggtctcgttgctgcttctggctgggctgggggggacgaagcccctgcccggccctctgccgccccttttgtggcccccgggttttttctccccgcccccccgaggcttgcttccggagggaaccgaagaccatttatcatgcccccggaatcccccgaacacttaccccattgctcccaaacgaaccctttggggaaaacccccaccctgaggtgccacacttcccttcccccttgctgccgtgttacccccactaatctactaacccgagtacactaaaaaaaacttttgacatctttctagcagacacctcttatcatacccctaatccaacaatccacatccccccactacttccttagatacaactaccctatcacgccctactatcacttccatctctccataccatactcacgcaccctccccgcgctccctacccatcaactcccccatcacctttcatcaaactctccacgaatactaccgaccaccccacactgactctctc

SEQ ID NO: 168 - DNA, 1420 bp, Homo Sapiens
  misc_feature (924)..(924): n is a, c, g, or t
  misc_feature (946)..(946): n is a, c, g, or t
cccccctaagagatactagagaggacgcatcaccatcaccatcacggtcgacccacgcgtccgagccgggcactacaggaccggcatggtgacacagcccttcatgtggcctgccagcgccagcacttggcctgtgcccgctgcctgctggaagggcggccagagccaggcagaggaacatctcactctctggacctccagctgcaaaactggcaaggtctggcttgtctccacattgccacccttcagaagaaccaaccactcatggaattgctgcttcggaatggagctgacattgatgtgcaggagggcaccagtggtaagacagcgctgcacctggctgtggaaacccaagagcggggcctggtacagttcctgctccaggctggtgcccaggtagatgcccgcatgctgaacgggtgcacacccctgcacctggcagctggccggggtctcatgggcatctcatccactctgtgcaaggcgggtgctgactccctgctgcggaatgtggaggatgagacgccccaggacctgactgaggaatcccttgtccttttgccctttgatgacctgaagatctcagggaaactgctgctgtgtaccgactgaagccaggcagggtctgggatcctcagggctccacctctccatctggaagccggagccataactgctgcagtttgggcccaggctatgtgctcttctggtgccctagggactgctgtggccagagcctggggccagccagtacagtcctgagccgaggaggaagggactgcaagtggaagagagccagtctggaaggaagagctttccaggtggacagggcttcttggaagacccccaagccccaggtatcctgggtgaagcctgtttgcctctcttgaaaatggcaggtgctcttgtttaccccatgttggntcagccctgaactgcgcaccantaggaagctggactccccgcatgaaaaaaaaccgaaataggaccaaccagaacccggaaaggggtccctccttttgttgttgagaccccgaaaccccgtggttaaaaacttccccaaaaggtcctcactgacccccggggaaagacaacctcctaccttcccaccaaaggcaaccccccaaaacctcttccctttcaccccattccgcccccctcctcacgtcacatgtgcttttacccacacacccgcccaccttctccaacccctaacgaaaaaacttccccccacacctccctctttcatcacttctaacccccaatgccactatcttctcactcaacaaaccttcttcccccccatccatacgtcccccccaccaccactcccgccacccctgcatccccactccaccccactcacgacatccacacccaatcccacacgtaccaccaacacccttccaatcctccacct

SEQ ID NO: 169 - DNA, 1329 bp, Homo Sapiens
  misc_feature (10)..(10): n is a, c, g, or t
gcctcccctnctaggaaatactatagaggatgcatcaccatcaccatcacggtcgacccacgcgtccggcagactactacaaaggcgaggagtccaacagctcagccaacaagtgtctgctgaaggtggctggttacgctgcgctgctggagcagtatcagaaggccattgacatctacgaacaggtggggaccaatgccatggacagccccctcctcaagtacagcgccaaagactacttcttcaaggcggccctctgccacttctgcatcgacatgctcaacgccaagctggctgtccaaaagtatgaggagctgttcccagctttctctgattcccgggaatgcaagttgatgaaaaaattgctagaggcccacgaggagcagaatgtggacagctacaccgagtcggtgaaggaatacgactccatctcccggctggaccagtggctcaccaccatgctgctgcgcatcaagaagaccatccagggcgatgaggaggacctgcgctaagccccacccagccccccagtgcccgtcttcctgtcccatctgctcagagagaggtggggccgagacttgctggagagcttccctcctttcccatctggggagtcccgcgggccacagtgggcaggtggcaccgggggtcagcatgcaggggcgccagaggcccaggctgctggccggacagtcaccctctgttctcgctacatcccttgccccctgtccatttatttaagcccccataggtgcccttcacccccaaaaccagctgtacagaatctttgatacagacctatttgctaggggtgctgccggggatttggggtcagcatctggccccctatctcctgacccactgagtcatgaggccgggttctctctctccccccctttgtcccccagccagctctaaagcacatgtagccgctgacacctgctggttctgctggcgaaaacctttatccacaccaccaaacaagccaccccacaactccctcacaacacccaccttcccccaccacctcacccccccaaccaacaccaaccacctccacccacacctcctccacatcaaccccaatcattccccacactccagacaacaccacaccactcgccttaaccacctcacatacatcacccccccactaccctcaactcatacacacacacacaaaccacaatccaacccaccactatctatactcatctcatcccatccagaacacacaatttctaccactccccactctcaccctaacaccacaaatagacaattactctcatcaaccttccaacccaccactctaccataccctaaccc

SEQ ID NO: 170 - DNA, 1275 bp, Homo Sapiens
  misc_feature (1061)..(1061): n is a, c, g, or t
  misc_feature (1113)..(1113): n is a, c, g, or t
  misc_feature (1138)..(1139): n is a, c, g, or t
  misc_feature (1201)..(1201): n is a, c, g, or t
  misc_feature (1205)..(1205): n is a, c, g, or t
  misc_feature (1213)..(1213): n is a, c, g, or t
  misc_feature (1226)..(1228): n is a, c, g, or t
  misc_feature (1232)..(1236): n is a, c, g, or t
  misc_feature (1240)..(1240): n is a, c, g, or t
  misc_feature (1244)..(1244): n is a, c, g, or t
  misc_feature (1248)..(1248): n is a, c, g, or t
  misc_feature (1257)..(1258): n is a, c, g, or t
taagagattacttgagaggatcgcatcaccatcaccatcacggtcgacccacgcgtccggccgcacctacaccagccaacccagatcccgaggtccgacagcgcccggcccagatccccacgcctgccaggagcaagccgagagccagccggccggcgcactccgactccgagcagtctctgtccttcgacccgagccccgcgccctttccgggacccctgccccgcgggcagcgctgccaacctgccggccatggagaccccgtcccagcggcgcgccacccgcagcggggcgcaggccagctccactccgctgtcgcccacccgcatcacccggctgcaggagaaggaggacctgcaggagctcaatgatcgcttggcggtctacatcgaccgtgtgcgctcgctggaaacggagaacgcagggctgcgccttcgcatcaccgagtctgaagaggtggtcagccgcgaggtgtccggcatcaaggccgcctacgaggccgagctcggggatgcccgcaagacccttgactcagtagccaaggagcgcgcccgcctgcagctggagctgagcaaagtgcgtgaggagtttaaggagctgaaagcgcgcaataccaagaaggagggtgacctgatagctgctcaggctcggctgaaggacctggaggctctgctgaactccaaggaggccgcactgagcactgctctcagtgagaagcgcacgctggagggcgagctgcatgatctgcggggccaggtggccaagcttgaggcagccctaggtgagggcaagaagcaacttcaggatgagatgctgcggcggggtggatgctgagaacaggctgcagaccatgaaggaggaactggacttccagaaaacatctaccgtgaggagctgcgtgagaccagcgccgtcatgagaccgactgggggagattgacatggggagcaccgtgagtttgaaagccgctggcggagccctgcaggactggcggcccacatgaggaccggtgggacatataaaaaggattgaaaaaactatctgcaagcgggaaaggcagnaatctgctgaaaggaaacacctgggggggtgccccaagaattgaaaatcggnttcccattaaagctcctgccagttnncactcaaaaaaggggacaaggaggaattcaaactggggatctggccggagggaccccccggntttnggaaaagngagatgccatggnnnggtnnnnnctgnaaanaaanttgtgaccnngcccgcggaaccccccc

SEQ ID NO: 171 - DNA, 1413 bp, Homo Sapiens
  misc_feature (6)..(8): n is a, c, g, or t
  misc_feature (1348)..(1348): n is a, c, g, or t
ccccannnccacgagatactagagaggacgcatcaccatcaccatcacggtcgacccacgcgtccgcgggcagcgccacctccacgagagcccgggacgcgggaaagaccgaaaggacgcctaagaggcaccggtggccatggggctggaggcggcgcgcgagctggagtgcgcggcgctgggcacgctgctgcttcatccgcgggaggcggaacgcacgctgctgctggactgccgccccttcctggccttctgccggcgccacgtgcgcgccgcgcggccagtgccttggaacgcgctgctgcggcgccgcgcgcgcggccctcctgccgccgttctcgcctgcctgctgcccgaccgcgcgctgcggacgcgcctggtccgcggggagctggcgcgggccgtggtgctggacgagggcagtgcctcggtggcggagctccggcccgacagacccggctcatgtgctgctggccgcgctgctgcacgagacccgcgcgggggccaccgcccgagaacttcctgcgaggaggcttcccacggcttcccagggcgccggccccgacctgggccccgaagccccccgccccgggcgcggcccgcaaccgggggagcaaaccccgcccgccccccaatcccggggcccccgggccaccacccgggggggccccgggggaaacatggccccccccgggccccggggcaatggccacccccccccccaaacccgccaagggccccccaggcccgggggcaatcccaccccgccccacacgggggccccccccggggcccccccccacccttggggggccccctcccccccccccaaaaaaaaccccccgcggaggaacccccccagggggggaaaccccgcgccccgggcccccccaggacccccaaagcccctcccggggagaagggggcccccccccccccccacaaaccccccggggggcccccaccagcaaaaacaccaggggcgccccccccccccccgccggggcgcaccaccccaccaggccaaacaacccccccccccccccccccccacacagaggggggagaaaaaacacccacccccgccgcggcgcggcgcgacccccccccccgaacactccccccccccccccccccccccccgcggcgagcaacccccacccaaaaacccccccccgccggcggggcgcgccaccccctccctccccccaccacaaacacccccccgcgggccccaccccccccccccacacatccaaacgcaaacgggccacgcccaacccaccacacccccgtcgccccgcacgaggggaggacccccaccaccccccgccccccccccaacccngccaagaaacccacaccacaggccggattcccccgccccacaacaaaccacaccccacacccgca

SEQ ID NO: 172 - DNA, 1365 bp, Homo Sapiens
tatgagaggtcgcatcaccatcaccatcacggtcgacccacgcgtccgggcggctccggcgcagaccttggagagcacagctgccggcccgcgagccagcctcggttcccgcggcccgccgaggctcggagccatccagcgacccggcgaccggcctcaggccccgccatggggaagaccaacagcaagctggcccccgaggtgctggaggaccttgttcagaacactgagttcagcgagcaggagctgaagcagtggtacaagggcttcctgaaggactgccccagtggcatcctcaacctggaggagtttcagcagctctacatcaagttcttcccctacggcgacgcctccaagttcgcgcagcacgctttccgcaccttcgacaagaacggcgacggcaccatcgacttccgggagttcatctgcgccctgtcggtcacctcccgcggcagcttcgagcagaagctcaactgggcctttgagatgtacgacctggacggcgacgggcgaatcacgcgcctggagatgctggagatcatcgaggcaatctacaagatggtgggcaccgtgatcatgatgcgcatgaaccaggacgggctcacgccccagcagcgtgtggacaagatcttcaagaagatggaccaggataaggacgaccagattacattggaggagttcaaggaggcagccaagagtgacccatccattgtgttgctgctgcagtgtgacatgcagaagtagaagctggtgaggggcagggtccctggccagaaggggcatggccacctcccaacctgatgacctctctggctggcctccaggaggagggacactccagccccctctctggcccacccgtcctctgcccaagcccttctcccctccataaaaatctttgaggaccacctcaccctgcaaaaagaccggtcctcaaaaccctgactctaacccacctcccctttggcaaaacaagtgccattggcatagcgcactccccttcctccaacccccgctccaccacatgtcacgctccccccctcaaacaccccctcactaacaaaccctccacttttctaccaatcccactaccaacaataccctaatatccacactactccacacctcctcccactactcttcccctccccctaaccctccatataccctacaccccatcacatcatcctctcaccaccgccccacccctacaactccccgtacacccacactacccccacgtaacacatcctcccactaaatctcacacgcacttcctcatattcactaccccactccctttactaacctccacccccgttcccatacttttcctcactaccaactccttaaccttcatactat

SEQ ID NO: 173 - DNA, 1277 bp, Homo Sapiens
  misc_feature (1)..(2): n is a, c, g, or t
  misc_feature (743)..(743): n is a, c, g, or t
  misc_feature (1208)..(1208): n is a, c, g, or t
  misc_feature (1253)..(1253): n is a, c, g, or t
nnccgctccgcctccctaagaatactagagaggatgcatcaccatcaccatcacggtcgacccacgcgtccgcgcctaccctctaaggacctagtgaccccctctgactgctacgtgactctctggctgcccacggcctgcagccacaggctccagacacgcacggtcaagaacagcagtagccctgtctggaaccagagctttcacttcaggatccacaggcagctcaagaatgtcatggaactgaaagtctttgaccaggacctggtgaccggagatgaccctgtgttgtcagtactgtttgatgcggggactctgcgggctggggagttccggcgcgagagcttctcactgagccctcagggtgaggggcgcctggaagttgaatttcgcctgcagagtctggctgaccgtggcgagtggctcgtcagcaatggcgttctggtggcccgggagctctcctgcttgcacgttcaactggaggagacaggagaccagaagtcctcagagcacagagttcagcttgtggttcctgggtcctgtgagggtccgcaggaggcctctgtgggcactggcaccttccgcttccactgcccagcctgctgggagcaggagctgagtattcgcctgcaggatgcccccgaggagcaactaaaggcgccactgagtgccctgccctctggtcaagtggtgaggcttgtcttccccacgtcccaggagcccctgatgagagtggagctganaaaagaagcagggctggagtgcaatggcgtgatcttggctcactgcaacctccgcctctggggttcaagcgattctcctgcctcagcctcccgagtagctgggattacagactgaaggagctggccctgcgactgggctccggcccctgggcaaaagaacaagccttcctggacaagaggaaaccagtggtggccgcgcccttgaagcaagcccctgcactggatggagacctgcaaggaggattagatcccaggggaagttaatatggccactggtggtgggaatccgggcaatgacttccctgtagggcaccttggctgccctggaggacctgggccctcttgaaatgctcctcctaaatccccggggccttcgcttcccctgggccttggcccacctttttgaggccccaaaagggtctccaaagaacccggcaggccccccctgtattcctgaaaaccccngagaacaaaaacaagcctgggtgcccctgcccccccagcactctnaaacgcgacccgaggactcccacc

SEQ ID NO: 174 - DNA, 1105 bp, Homo Sapiens
  misc_feature (1)..(4): n is a, c, g, or t
  misc_feature (731)..(731): n is a, c, g, or t
  misc_feature (1068)..(1068): n is a, c, g, or t
  misc_feature (1076)..(1076): n is a, c, g, or t
  misc_feature (1079)..(1079): n is a, c, g, or t
  misc_feature (1082)..(1082): n is a, c, g, or t
  misc_feature (1085)..(1085): n is a, c, g, or t
  misc_feature (1087)..(1087): n is a, c, g, or t
  misc_feature (1090)..(1090): n is a, c, g, or t
  misc_feature (1093)..(1095): n is a, c, g, or t
  misc_feature (1099)..(1103): n is a, c, g, or t
nnnncttaagaatacttgagaggatgcatcaccatcaccatcacggtcgacccacgcgtccggttgaaagtgtgatgaacagtgtggtatccctactcttgatcctggaaccagacaagcaagaagctttgattgaaagcctatgtgaaaagctggtcaaatttcgcgaaggtgaacgcccgtctctgagactgcagttgttaagcaaccttttccacgggatggataagaatactcctgtaagatacacagtgtattgcagccttattaaagtggcagcatcttgtggggccatccagtacatcccaactgagctggatcaagttagaaaatggatttctgactggaatctcaccactgaaaaaaagcacacccttttaagactactttatgaggcacttgtggattgtaagaagagtgatgctgcttcaaaagtcatggtggaattgctcggaagttacacagaggacaatgcttcccaggctcgagttgatgcccacaggtaatgttaaacgttactctgatgagggtttgacagcgatgtagaggtaagctacaatattaaattaagtaactgaaatcatgtttgcaactaccagtgatccagagccatttgatagtgtgtatttcctggtgattctaatgtagatactaaaattcaaggtttgatattggaagaactgtggattgaatatgaagtagctgcatggcgttacctgccgggggggggnaatgctggatgggcgaattatgatcccaacccaggaattaaacctaatcttcggcaattgacctaattttaggttataggtggaacttgatggcttgccaaaattacccattgctatgagtataaggcttttacagtctagatctactggtacaaaatagaatcagtttctaatcttgtataaggatatgaacttcttttttggcatgctttggggaactcactgatagagtggaaaaaggattggggaaaaactgactttaggcaggggctccttcaatctatcccccttatgaacttctaacgtttaagtataaggggaaaaaaatgttgtttangtttcggnaanaanatngnganaannntagnnnnngg

SEQ ID NO: 175 - DNA, 1513 bp, Homo Sapiens
  misc_feature (14)..(15): n is a, c, g, or t
  misc_feature (21)..(21): n is a, c, g, or t
  misc_feature (1501)..(1501): n is a, c, g, or t
caggtatgtgtatnnaggatncatcccatcaccatcacggtcgacccacgcgtccgcagatcaaacggtcagcccgcatgtgtggtgagtgtgaggcatgtcggcgcactgaggactgtggtcactgtgatttctgtcgggacatgaagaagttcgggggccccaacaagatccggcagaagtgccggctgcgccagtgccagctgcgggcccgggaatcgtacaagtacttcccttcctcgctctcaccagtgacgccctcagagtccctgccaaggccccgccggccactgcccacccaacagcagccacagccatcacagaagttagggcgcatccgtgaagatgagggggcagtggcgtcatcaacagtcaaggagcctcctgaggctacagccacacctgagccactctcagatgaggacctacctctggatcctgacctgtatcaggacttctgtgcaggggcctttgatgaccatggcctgccctggatgagcgacacagaagagtccccattcctggaccccgcgctgcggaagagggcagtgaaagtgaagcatgtgaagcgtcgggagaagaagtctgagaagaagaaggaggagcgctacaagcggcatcggcagaagcagaagcacaaggataaatggaaacacccagagagggctgatgccaaggaccctgcgtcactgccccagtgcctgcggcccggctgtgtgcgccccgcccagcccagctccaagtattgctcagatgactgtggcatgaagctggcagcccaccgcatctacgagatcccccccagcgcatccagcagtggcagcagagcccttgcattgctgaagagcacggcaaaaagctgctccaacgcattcgccgagagcaacagagtgcccgcactccccttcaggaaatgaaacgccgattccatgaccttgaggccatcattctacgtccaagcaacacgctgtgccccagaataagaaaacaaccaaggtgaccgtcatgaccaaacctgcaatctccgtgtttccgggggcccccctcaacccacatgtgccttgccccaatgaacgctgctaccccataagaaaccataatcccctccgaccatttccccgacctcttcacatcccacccacctcttacactttcaaacccccaccacccactccaacccttcctcccacccttaacctcccatcctacaccctctcttacaccctcctctcccacctccacccctacatctctaccctcaccccaccacatccccctcatcaacacaaccttctaacaccctcatcctcaccacaccctacctcatctcccatccccccatctctaaatccaccactatcccactaacccacatactcacccccctcatccacaactctacacaccccactcccacccactccctctttctctctcataccctacaccactccgacatcaacagaccactaccacatgaccctcaccccccatcctaccnctaccattcatt

SEQ ID NO: 176 - DNA, 1383 bp, Homo Sapiens
  misc_feature (636)..(636): n is a, c, g, or t
caggttatgacagagaggacgcatcaccatcaccatcacggtcgaccccgcgtccgggcgtcggtgctcagcggtgttggaacttcgttgcttgcttgcctgtgcgcgcgtgcgcggacatggcctcaaacgattatacccaacaagcaacccaaagctatggggcctaccccacccagcccgggcagggctattcccagcagagcagtcagccctacggacagcagagttacagtggttatagccagtccacggacacttcaggctatggccagagcagctattcttcttatggccagagccagaacacaggctatggaactcagtcaactccccagggatatggctcgactggcggctatggcagtagccagagctcccaatcgtcttacgggcagcagtcctcctatcctggctatggccagcagccagctcccagcagcacctcgggaagttacggtagcagttctcagagcagcagctatgggcagccccagagtgggagctacagccagcagcctagctatggtggacagcagcaaagctatggacagcagcaaagctataatccccctcagggctatggacagcagaaccagtacaacagcagcagtggtggtggaggtggaggtgganggtggaggtaactatggccaagatcaatcctccatgagtagtggtggtggcagtggtggcggttatggcaatcaagaccagagtggtggaggtggcagcggcggctatggacagcaggaccgtggaggccgcggcaggggtggcagtgttggcggcggcggcggcggcggcggtgtttactaccgcagcaggggtggctaatgacccccacagcctggaagcggcccgggaagcaaaacggggcagcggcgcaactcaccctcgtggcctccaacacattgcgtaccctcgggaccaggatcacgccctgaactccaaccgggctccccaccccccaagctcgcctctccaccagacccggccaacaatgcccccctaccttccgcctcactctctctccccatccctcctctcacccaacccccatccgtgctccccctccaatactcacaaccaccagcgcacttccatcacccactcgaacattaccccctaccttttcaaccccttatccactcctccacccatcccccccgccacaccaccctccaccaccactgactcccatataccctcccccaatcctccactcccccaagcaactcttccaccaccctcacctggacactcatccacctcccttccactctccacacctgtcgccacatcctacactccgctccactcccaacacccccccctacgctccaccactaccaacaccttatcctcatcctcccctacctt

SEQ ID NO: 177 - DNA, 597 bp, Homo Sapiens
  misc_feature (9)..(11): n is a, c, g, or t
caattcccnnncctgagaactacttgagaggatcgcatcaccatcaccatcacggtcgacccacgcgtccggccatctgcggtggagccgccaccaaaatgcagattttcgtgaaaacccttacggggaagaccatcaccctcgaggttgaaccctcggatacgatagaaaatgtaaaggccaagatccaggataaggaaggaattcctcctgatcagcagagactgatctttgctggcaagcagctggaagatggacgtactttgtctgactacaatattcaaaaggagtctactcttcatcttgtgttgagacttcgtggtggtgctaagaaaaggaagaagaagtcttacaccactcccaagaagaataagcacaagagaaagaaggttaagctggctgtcctgaaatattataaggtggatgagaatggcaaaattagtcgccttcgtcgagagtgcccttctgatgaatgtggtgctggggtgtttatggcaagtcactttgacagacattattgtggcaaatgttgtctgacttactgtttcaacaaaccagaagacaagtaactgtatgagttaataaaagacatgaact

SEQ ID NO: 178 - DNA, 1223 bp, Homo Sapiens
  misc_feature (1)..(1): n is a, c, g, or t
  misc_feature (10)..(11): n is a, c, g, or t
ngccacactnncccaagagatactagagaggatcgcatcaccatcaccatcacggtcgacccacgcgtccgaatccccagaagtttgcactttttaagcggatacacaaggacggacaagtgctcttccagaaactctccattgctgaccgccccctctacctgcgcctgcttgctgggcctgacacggaggtcctcagctttgtgctaaaggagaatgaaactggagaggtagagtgggatgccttctccatccctgaacttcagaacttcctaacaatcctggaaaaagaggagcaggacaaaatccaacaagtgcaaaagaagtatgacaagtttaggcagaaactggaggaggccttaagagaatcccagggcaaacctgggtaaccggtcctgcttcctctcctcctggtgcattcagatttatttgtattattaattattattttgcaacagacactttttctcaggacatctctggcaggtgcatttgtgcctgcccagcagttccagctgtggcaaaagtctcttccatggacaagtgtttgcacgggggttcagctgtgcccgcccccaggctgtgccccaccacagattctgccaaggatcagaactcatgtgaaacaaacagctgacgtcctctctcgatctgcaagcctttcaccaaccaaatagttgcctctctcgtcaccaaactggaacctcacaccagccggcaaaggaaggaagaaaggttttagagctgtgtgttctttctctggctttgattcttctttgagttctcttacttgccacgtacaggaccattatttatgagtgaaaagttgtagcacattccttttgcaggtctgagctaaacccctgaaagcagggtaaagctcataaaaggactggtccccccggcccaaaggggcctgttgtcacacttaagggaagcttataaagctatcggcccccaaacgttcgggtaaagagccaccaaccctgccgttgctccaaaactccccaaaaccctcaactcgcccggccctggccccgcaccccccccccattgcacttgcaaacccaaacgcaatacccctgccatagtaaacacctaaccccacctctacaacaacctccctccctccaatcaaacatcaactcccacacccacatctccctctacctcctccacaccgacaccctcttactccaccttaaaacataaccccctcccac

SEQ ID NO: 179 - DNA, 1283 bp, Homo Sapiens
  misc_feature (1)..(1): n is a, c, g, or t
  misc_feature (839)..(839): n is a, c, g, or t
  misc_feature (904)..(904): n is a, c, g, or t
  misc_feature (948)..(948): n is a, c, g, or t
  misc_feature (964)..(964): n is a, c, g, or t
  misc_feature (968)..(968): n is a, c, g, or t
  misc_feature (971)..(971): n is a, c, g, or t
  misc_feature (989)..(989): n is a, c, g, or t
  misc_feature (1006)..(1006): n is a, c, g, or t
  misc_feature (1102)..(1102): n is a, c, g, or t
  misc_feature (1105)..(1105): n is a, c, g, or t
  misc_feature (1112)..(1112): n is a, c, g, or t
  misc_feature (1114)..(1114): n is a, c, g, or t
  misc_feature (1125)..(1125): n is a, c, g, or t
  misc_feature (1129)..(1129): n is a, c, g, or t
  misc_feature (1136)..(1136): n is a, c, g, or t
  misc_feature (1157)..(1157): n is a, c, g, or t
  misc_feature (1159)..(1161): n is a, c, g, or t
  misc_feature (1171)..(1172): n is a, c, g, or t
  misc_feature (1191)..(1192): n is a, c, g, or t
  misc_feature (1207)..(1207): n is a, c, g, or t
  misc_feature (1224)..(1224): n is a, c, g, or t
  misc_feature (1236)..(1236): n is a, c, g, or t
  misc_feature (1239)..(1239): n is a, c, g, or t
  misc_feature (1242)..(1242): n is a, c, g, or t
  misc_feature (1247)..(1247): n is a, c, g, or t
  misc_feature (1255)..(1255): n is a, c, g, or t
  misc_feature (1261)..(1262): n is a, c, g, or t
  misc_feature (1266)..(1267): n is a, c, g, or t
  misc_feature (1269)..(1269): n is a, c, g, or t
  misc_feature (1271)..(1271): n is a, c, g, or t
  misc_feature (1273)..(1273): n is a, c, g, or t
  misc_feature (1275)..(1275): n is a, c, g, or t
ncctaagagatacttgagaggtcgcatcaccatcaccatcacggtcgacccacgcgtccggaagccatccacacgggagccaaggccggccgggtcccctcgggtgctatgaagatgccgaccatggtgcccctgagcctcctgagcgtgccccagctgagcggagccggcgggggagggggagaggcgggtgccggcggcggcgctgccgcagtggccgccggtggcgtggtgaccacgaccgcctcggggaagcgcatccggaagaaccatgcctgcgagatgtgtggcaaggccttccgcgacgtctaccacctgaaccgacacaagctgtcgcactcggacgagaagccctaccagtgcccggtgtgccagcagcgcttcaagcgcaaggaccgcatgagctaccacgtgcgctcacatgacggcgctgtgcacaagccctacaactgctcccactgtggcaagagcttctcccggccggatcacctcaacagtcacgtcagacaagtgcactcaacagaacggcccttcaaatgtgagaaatgtgaggcagctttcgccacgaaggatcggctgcgggcgcacacagtacgacacgaggagaaagtgccatgtcacgtgtgtggcaagatgctgagctcggcttatatttcggaccacatgaaggtgcacagccagggtcctcaccatgtctgtgagctctgcaacaaaggtactggtgagggttgtccaatggccgcggcagcggcagcggcggcaacggcagcaacggcaacagaacaacccctcccccagctgggggctccctctcgggggcggaggggggggccgggaantctcaaccctttccctccaaccctggggagctccaattgggttgcggggaaaagggaaaatgganttaaaccccctggcacaaaccccttcccccccctttttccccanctcattttccccccancccnggncccccccaaagtaaaagngaaaaaatgttttctcngggatatccccagcttttaaaagatttttctcccgcccactttctacaaaaccccccccaccaacacgttcccctgtttgtgtaatacccttaacnccngctatcncnaccataccaanacanccacctnccgccccctctcttgctagancnnnccctctctannaacatcttctccctctcanncccccttttcttctncctcccccctctttccntatcttccttcnttngcnttttntctctttnaccctnntgcnncntncnancctcccgc

1-4. (canceled)

5. A method for in-vitro diagnosis and/or stratifying the risk of Alzheimer's disease, in particular Alzheimer's dementia, in a patient comprising detecting at least one marker sequence selected from the group of SEQ 1-179 and/or SEQ 1a-179a or each encoding a peptide thereof, or a partial sequence or fragment thereof.

6. The method of claim 5, for identification of patients with increased risk and/or unfavorable prognosis of Alzheimer's disease, in particular Alzheimer's dementia, and symptomatic and/or asymptomatic patients.

7. The method of claim 5, wherein the marker sequences are fixed on a solid support, in particular a filter, a membrane, a magnetic bead, a silica wafer, glass, metal, ceramics, plastics, a chip, a target for mass spectrometry or a matrix.

8. A method for diagnosing Alzheimer's disease, in particular Alzheimer's dementia, wherein
at least one marker sequence selected from the group of SEQ 1-179 and/or SEQ 1a-179a or each encoding a peptide thereof, or a partial sequence or fragment thereof is/are fixed on a solid support,
contacting with a bodily fluid or tissue of a patient,
determining/detecting a binding event between the bodily fluid and the marker sequence(s).

9. An array, assay or diagnostic device for diagnosing Alzheimer's disease, in particular Alzheimer's dementia comprising at least one cDNA selected from the group of SEQ 1-179 and/or SEQ 1a-179a or each encoding a peptide thereof, or a partial sequence or fragment thereof is/are fixed on a solid support.

10. (canceled)
